(19) United States
(12) Patent Application Publication
(10) Pub. No.: US 2020/0002759 A1
(43) Pub. Date: Jan. 2, 2020

(54) METHODS FOR STUDYING NUCLEOTIDE ACCESSIBILITY IN DNA AND RNA BASED ON LOW-YIELD BISULFITE CONVERSION AND NEXT-GENERATION SEQUENCING

(71) Applicant: William Marsh Rice University, Houston, TX (US)

(72) Inventors: David Yu ZHANG, Houston, TX (US); Jin-Hyung BAE, Houston, TX (US)

(73) Assignee: William Marsh Rice University, Houston, TX (US)

(21) Appl. No.: 16/457,009

(22) Filed: Jun. 28, 2019

Related U.S. Application Data
(60) Provisional application No. 62/691,848, filed on Jun. 29, 2018.

(51) Int. Cl. C12Q 1/6869; C07H 21/02; C07H 21/04; C07H 1/00; C12N 15/10

(52) U.S. Cl. CPC C12Q 1/6869; C07H 21/02; C12N 15/1072; C07H 1/00; C12N 15/1068; C07H 21/04

(57) ABSTRACT

Provided are methods for characterizing nucleotide accessibility and nucleic acid structure at single nucleotide resolution, using a combination of low-yield bisulfite conversion and next-generation sequencing (NGS). Cytosine (C) nucleotides that are in base-paired states or bound to proteins, etc. are less accessible to chemical reactions and thus exhibit lower bisulfite conversion yields. Analysis of NGS results of a low-yield bisulfite conversion product can thus inform nucleotide accessibility and nucleic acid structure. Compared to other methods for chemical probing of nucleic acid structure, the present methods provide higher information throughput, because each NGS read simultaneously reports on the base pair status of multiple nucleotides.

### REFERENCE TO RELATED APPLICATIONS

[0001] The present application claims the priority benefit of U.S. provisional application No. 62/691,848, filed Jun. 29, 2018, the entire contents of which is incorporated herein by reference.

### STATEMENT REGARDING FEDERALLY SPONSORED RESEARCH

[0002] This invention was made with government support under Grant No. RO1 HG008752 awarded by the National Institutes of Health. The government has certain rights in the invention.

### REFERENCE TO A SEQUENCE LISTING

[0003] The instant application contains a Sequence Listing, which has been submitted in ASCII format via EFS-Web and is hereby incorporated by reference in its entirety. Said ASCII copy, created on Jun. 26, 2019, is named RICEP0050US_ST25.txt and is 706 kilobytes in size.

### BACKGROUND

### 1. Field

[0004] The present invention relates generally to the field of molecular biology. More particularly, it concerns methods of low-yield bisulfite conversion of DNA and RNA.

### 2. Description of Related Art

[0005] Nucleic acids such as DNA and RNA can serve both as therapeutic drugs (e.g., RNAi therapy and mRNA therapy) and as drug targets (e.g., ribosomal RNA in bacteria for antibiotics). Thus, understanding the structure of nucleic acids and the accessibility of different nucleotides in a nucleic acid to biochemical reactions is of value to the pharmaceutical industry. Accurate analysis of nucleic acid structure before and after introduction of a potential protein or small molecule drug can confirm the effectiveness of the lead, and further verify the mechanism of drug action. Additionally, many biological pathways remain to date imperfectly elucidated; thus, understanding the interactions between nucleic acids and proteins is of great interest to the scientific community.

[0006] Over the past decades, X-ray crystallography (XRC) has been used to produce gold-standard structures of nucleic acids, but its low throughput, high sample requirement, and operation difficulty means that XRC cannot fulfill the current demand for high-throughput analysis of many different DNA and RNA molecules. Next-generation sequencing (NGS) is a powerful way of simultaneously analyzing millions of different nucleic acid molecules, and can be potentially combined with chemical probing methods such as SHAPE (Selective 2′ Hydroxyl Acylation analyzed by Primer Extension) (Lucks et al., 2011) to study the chemical accessibility of different nucleotides in a DNA molecule. The chemical accessibility is then correlated to nucleotide base pair status, with nucleotides more frequently paired generally being less accessible to chemical reactions.

[0007] Simultaneously, bisulfite ions at high concentrations are known to selectively react with the cytosine (C) nucleotides, converting them to uracil (U) nucleotides. In contrast, cytosines that are methylated are protected from this bisulfite conversion. Consequently, researchers have over the years turned bisulfite conversion into a workhorse for the study of epigenetics, differentiating hypermethylated vs. hypomethylated promoters. For this use of bisulfite conversion, users typically drive the bisulfite conversion reaction to completion through high temperatures, high bisulfite concentrations, and long reaction times. Driving the conversion to completion prevents ambiguities on whether a particular site is a methylated C or if it is an unmethylated C that failed to convert.

### SUMMARY

[0008] Provided herein are methods of bisulfite conversion, in which the conversion efficiency is intentionally designed to be low, so that differences in nucleotide accessibility (e.g., from being in a base-paired or protein-bound state) are reflected in bisulfite conversion yields.

[0009] In one embodiment, provided herein are methods for low-yield conversion of unmethylated cytosine nucleotides to uracil (U) nucleotides in a target nucleic acid molecule, the method comprising: (a) introducing a bisulfite solution to a sample comprising the target nucleic acid molecule to achieve a final bisulfite concentration of between 0.1 M and 10 M; (b) allowing the bisulfite conversion to react a temperature between 4° C. and 70° C.; (c) stopping the bisulfite conversion reaction through removal of the excess bisulfite; and (d) performing desulfonation.

[0010] In some aspects, unmethylated cytosines that do not participate in base pairing have a C to U conversion rate of no more than 95%, no more than 90%, no more than 85%, no more than 80%, no more than 75%, no more than 70%, no more than 65%, no more than 60%, no more than 55%, or no more than 50%.

[0011] In some aspects, the bisulfite concentration is between 0.1 M and 10 M, 0.5 M and 10 M, 0.1 and 5 M, 0.5 and 5 M, 4 M and 10 M, 4 M and 5 M, 0.1 M and 1 M, 0.5 M and 1 M, or any range derivable therein. In some aspects, the bisulfite concentration may be about 0.1 M, 0.5 M, 1 M, 1.5 M, 2 M, 2.5 M, 3 M, 3.5 M, 4 M, 4.5 M, 5 M, 5.5 M, 6 M, 6.5 M, 7 M, 7.5 M, 8 M, 8.5 M, 9 M, 9.5 M, or 10 M.

[0012] In some aspects, the reaction proceeds at a temperature between 4° C. and 70° C., 4° C. and 55° C., 37° C. and 70° C., 37° C. and 55° C., 45° C. and 70° C., 45° C. and 55° C., or any range derivable therein. In some aspects, the reaction proceeds at a temperature of about 4° C., 5° C., 10° C., 15° C., 20° C., 25° C., 30° C., 35° C., 40° C., 45° C., 50° C., 55° C., 60° C., 65° C., or 70° C.

[0013] In some aspects, the reaction proceeds for a time of between 1 minutes and 60 minutes, 10 seconds and 20 minutes, 5 minutes and 60 minutes, 30 minutes and 12 hours, or any range derivable therein. In some aspects, the reaction proceeds for a time of about 10 seconds, 30 seconds, 1 minute, 5 minutes, 10 minutes, 15 minutes, 20 minutes, 25 minutes, 30 minute, 35 minutes, 40 minutes, 45 minutes, 50 minutes, 55 minutes, 60 minutes, 65 minutes, 70 minutes, 75 minutes, 80 minutes, 85 minutes, 90 minutes, 2 hours, 3 hours, 4 hours, 5 hours, 6 hours, 7 hours, 8 hours, 9 hours, 10 hours, 11 hours, or 12 hours.

[0014] In some aspects, the bisulfite concentration is between 4 M and 10 M, and the reaction proceeds at a temperature between 4° C. and 55° C. for between 1 minutes and 60 minutes. In some aspects, the bisulfite concentration is between 4 M and 10 M, and the reaction proceeds at a temperature between 45° C. and 70° C. for between 10 seconds and 20 minutes. In some aspects, the bisulfite concentration is between 0.5 M and 5 M, and the reaction proceeds at a temperature between 45° C. and 70° C. for between 5 minutes and 60 minutes. In some aspects, the bisulfite concentration is between 0.1 M and 1 M, and the reaction proceeds at a temperature between 37° C. and 70° C. for between 30 minutes and 12 hours.

[0015] In some aspects, the target nucleic acid molecule is DNA, including but not limited in origin to genomic DNA from a cell or tissue sample, viral DNA, cell-free DNA, or synthetic DNA. In some aspects, the target nucleic acid molecule is RNA, including but not limited in origin to mRNA or non-coding RNA from a cell or tissue sample, viral RNA, cell-free RNA, or synthetic RNA.

[0016] In some aspects, the bisulfite conversion is stopped by separating the bisulfite from the target nucleic acid. In some aspects, the bisulfite is removed by a buffer exchange method, including but not limited to column purification or solid phase reversible mobilization (SPRI).

[0017] In some aspects, desulfonation is performed at a pH over 12.

[0018] In one embodiment, provided herein are methods of determining a nucleotide accessibility status of cytosine (C) nucleotides in a target nucleic acid molecule, the method comprising: (a) performing a low-yield bisulfite conversion reaction to convert a fraction of cytosine nucleotides in a population of the target nucleic acid molecules to uracil (U) nucleotides; (b) analyzing the converted nucleic acid molecules at each nucleotide position originally known to be a cytosine, to determine or estimate a conversion fraction of all molecules of the population that is converted at each nucleotide position originally known to be a cytosine; and (c) mapping the conversion fraction to a nucleotide accessibility status.

[0019] In some aspects, analyzing comprises sequencing the converted nucleic acid molecules. In some aspects, sequencing comprises massively parallel sequencing-by-synthesis, also known as next-generation sequencing (NGS). In some aspects, sequencing is sequencing via translocation current across a nanopore.

[0020] In some aspects, the fraction of all molecules of a target nucleic acid that are read as thymine (T) or uracil (U) at a given nucleotide is computed or estimated from sequencing data.

[0021] In some aspects, the low-yield bisulfite conversion converts unpaired cytosine nucleotides in a nucleic acid molecule with an efficacy of no more than 95%, no more than 90%, no more than 85%, no more than 80%, no more than 75%, no more than 70%, no more than 65%, no more than 60%, no more than 55%, or no more than 50%.

[0022] In some aspects, low-yield bisulfite conversion is achieved through (1) bisulfite concentrations of less than 4 M, (2) reaction with bisulfite solution for less than 60 minutes, and/or (3) reaction with bisulfite solution at a temperature less than 70° C.

[0023] In some aspects, mapping the conversion fraction to nucleotide accessibility status comprises comparing the conversion fraction at a C nucleotide position to conversion fractions of all other C nucleotide positions in the same nucleic acid species. In some aspects, mapping the conversion fraction to nucleotide accessibility status comprises comparing the conversion fraction at a C nucleotide position to conversion fractions of all other C nucleotide positions in the other all nucleic acid species within the same multiplexed conversion reaction. In some aspects, mapping the conversion fraction to nucleotide accessibility status comprises comparing the conversion fraction at a C nucleotide position to an information database of conversion fractions of C nucleotides in different accessibility states, under the same low-yield bisulfite conversion reaction conditions.

[0024] In some aspects, the nucleotide accessibility status is used to determine the base pair status of different nucleotides, in order to inform the correctness of a proposed secondary and/or tertiary structure of the nucleic acid. In some aspects, the nucleotide accessibility status is used to determine the nucleotide positions where a small molecule or protein is bound to the nucleic acid. In certain aspects, the small molecule or protein is a therapeutic drug and the nucleic acid is an endogenous RNA drug target. In certain aspects, the protein is an endogenous drug target and the nucleic acid is a therapeutic drug.

[0025] In one embodiment, provided herein are methods of determining a nucleotide accessibility status of cytosine (C) nucleotides in a target nucleic acid molecule, the method comprising: (a) performing a low-yield bisulfite conversion reaction to convert a fraction of cytosine nucleotides in a first sample of a population of the target nucleic acid molecules to uracil (U) nucleotides for a defined amount of time t₁; (b) constructing a next-generation sequencing (NGS) library based on the converted nucleic acid molecules and running NGS; (c) analyzing the NGS reads to determine, for each nucleotide position originally known to be a cytosine, the fraction of all molecules of the converted nucleic acid molecules that is converted to determine a bisulfite conversion rate; (d) repeating steps (a) through (c) for a second sample of the same population of nucleic acid molecules, subject to a low-yield bisulfite conversion reaction for a different amount of time t₂; and (e) determining the accessibility of a nucleotide in the target nucleic acid molecules based on the combined analysis of the bisulfite conversion rates from both time points.

[0026] In some aspects, the low-yield bisulfite conversion converts unpaired cytosine nucleotides in a nucleic acid molecule with an efficacy of no more than 95%, no more than 90%, no more than 85%, no more than 80%, no more than 75%, no more than 70%, no more than 65%, no more than 60%, no more than 55%, or no more than 50%.

[0027] In some aspects, low-yield bisulfite conversion is achieved through (1) bisulfite concentrations of less than 4 M, (2) reaction with bisulfite solution for less than 60 minutes, or (3) reaction with bisulfite solution at a temperature less than 70° C.

[0028] In some aspects, mapping the conversion fraction to nucleotide accessibility status comprises comparing the conversion fraction at a C nucleotide position to conversion fractions of all other C nucleotide positions in the same nucleic acid species. In some aspects, mapping the conversion fraction to nucleotide accessibility status comprises comparing the conversion fraction at a C nucleotide position to conversion fractions of all other C nucleotide positions in the other all nucleic acid species within the same multiplexed conversion reaction. In some aspects, mapping the conversion fraction to nucleotide accessibility status comprises comparing the conversion fraction at a C nucleotide position to an information database of conversion fractions of C nucleotides in different accessibility states, under the same low-yield bisulfite conversion reaction conditions.

[0029] In some aspects, the nucleotide accessibility status is used to determine the base pair status of different nucleotides, in order to inform the correctness of a proposed secondary and/or tertiary structure of the nucleic acid. In some aspects, the nucleotide accessibility status is used to determine the nucleotide positions where a small molecule or protein is bound to the nucleic acid. In certain aspects, the small molecule or protein is a therapeutic drug, and the nucleic acid is an endogenous RNA drug target. In certain aspects, the protein is an endogenous drug target, and the nucleic acid is a therapeutic drug.

[0030] As used herein, “essentially free,” in terms of a specified component, is used herein to mean that none of the specified component has been purposefully formulated into a composition and/or is present only as a contaminant or in trace amounts. The total amount of the specified component resulting from any unintended contamination of a composition is therefore well below 0.05%, preferably below 0.01%. Most preferred is a composition in which no amount of the specified component can be detected with standard analytical methods.

[0031] As used herein the specification, “a” or “an” may mean one or more. As used herein in the claim(s), when used in conjunction with the word “comprising,” the words “a” or “an” may mean one or more than one.

[0032] The use of the term “or” in the claims is used to mean “and/or” unless explicitly indicated to refer to alternatives only or the alternatives are mutually exclusive, although the disclosure supports a definition that refers to only alternatives and “and/or.” As used herein “another” may mean at least a second or more.

[0033] Throughout this application, the term “about” is used to indicate that a value includes the inherent variation of error for the device, the method being employed to determine the value, or the variation that exists among the study subjects.

[0034] Other objects, features and advantages of the present invention will become apparent from the following detailed description. It should be understood, however, that the detailed description and the specific examples, while indicating preferred embodiments of the invention, are given by way of illustration only, since various changes and modifications within the spirit and scope of the invention will become apparent to those skilled in the art from this detailed description.

### BRIEF DESCRIPTION OF THE DRAWINGS

[0035] The following drawings form part of the present specification and are included to further demonstrate certain aspects of the present invention. The invention may be better understood by reference to one or more of these drawings in combination with the detailed description of specific embodiments presented herein.

[0036] FIG. 1: Workflow for low-yield bisulfite conversion and NGS library preparation. The sodium bisulfite reaction was performed for a significantly shorter amount of time and at a lower temperature than recommended by the kit provider (Zymo Research), in order to accentuate the difference in C>U conversion rates between paired and unpaired nucleotides. The target-specific halves of the splint oligos (shown in black) contain degenerate purine nucleotides R, corresponding to a mixture of G and A, in order to efficiently bind all possible conversion products.

[0037] FIG. 2: Control oligo demonstrating validity of low-yield bisulfite conversion as a method of probing secondary structure. This oligo (SEQ ID NO: 9) was rationally designed to have a very stable and unambiguous minimum free energy (MFE) structure containing a large hairpin. The observed conversion rate for each C nucleotide, based on NGS experiments, is listed in the illustration. As expected, all C nucleotides predicted to be unpaired (green) exhibit high conversion rates, and all C nucleotides predicted to be paired (red) exhibit low conversion rates. The C nucleotides near the ends of the predicted duplex region (yellow) show intermediate conversion rates, due to base breathing that reduce the likelihood of the nucleotide being paired at equilibrium.

[0038] FIG. 3: Controlling bisulfite conversion yield via reaction time. Here, the temperature of the reaction was set to 37° C. to mimic biological conditions, and different reaction times resulted in different C>U conversion rates for the different nucleotides. Importantly, this time series shows a graded response of conversion rate of C nucleotides in base-paired states, with lower conversion in C nucleotides “deeper” in the hairpin stem.

[0039] FIGS. 4A-C: Use of low-yield bisulfite conversion and NGS results to inform nucleic acid structure. (FIG. 4A) Minimum free energy (MFE) structure of an STK11 exon subsequence as predicted by standard thermodynamic parameters versus using updated TEEM parameters for bulges and mismatches. The nucleotide bases are color-coded by their accessibility in the MFE structure predicted by standard parameters. Even though the two MFE structures have similar folding energies, the structure and base accessibility are very different. (FIG. 4B) Two different secondary structures of the target nucleic acid, a subsequence of the human SMARCA4 gene, are proposed based on different thermodynamics parameters. Nucleotides here are colored/shaded based on the predicted state using thermodynamics parameters from SantaLucia, 1998 (left). The right structure is predicted based on forthcoming thermodynamic parameters from Bae and Zhang, 2018. (FIG. 4C) Predicted MFE structures of a KEAP1 exon subsequence based on updated TEEM parameters, colored by predicted structure using standard parameters.

[0040] FIGS. 5A-B: Chemical assay of DNA secondary structure using low-yield bisulfite conversion and next-generation sequencing (NGS). (FIG. 5A) Low-yield bisulfite conversion rates of C nucleotides in the 3 oligos shown in FIGS. 4A-C. Boxes indicate sample standard deviations and horizontal lines show mean values. The nucleotides predicted to be paired by TEEM parameters (PP) are statistically significantly lower in conversion rate than the nucleotides predicted to be unpaired (PU); the left panel shows the aggregated data from all 3 oligos. P-values shown are based on Mann-Whitney tests. (FIG. 5B) Predicted paired (PP) nucleotides and predicted unpaired nucleotides (PU), based on SantaLucia 2004 parameters, do not show statistically significant differences in bisulfite conversion rates. P-values shown are based on Mann-Whitney tests.

[0041] FIG. 6: NGS workflow starting from a pool of 1,967 oligonucleotides, which were all 150 nucleotides long. The first step was PCR where one of the primers had dU at 3′-end and three phosphorothioate bonds at 5′-end. Resulting amplicons had both USER and BciVI restriction sites. After using BciVI, Lambda exonuclease, and USER, primer binding regions were removed, and only the 100-nucleotide long areas of interest remained. Low-yield bisulfite conversion was then performed, followed by two ligation steps to attach NGS adaptors with the help of random hexamers on the guiding oligos. NGS library preparation was finished by running index PCR.

[0042] FIG. 7: Data processing. An NGS library generated 5.3 million of raw reads with some of C converted to T as a result of Low Yield Bisulfite Conversion. For alignment purpose, all C and T were written as Y temporarily in both the raw reads and the reference sequences. After selecting only perfectly aligned reads, 2.6 million reads were left with the median read depth of 603. All C and T were then recovered from Y. To make data processing faster and more efficient, C converted to T during Low Yield Bisulfite was treated as 1 whereas C unconverted to T was treated as 0. Finding the dominant structure of an oligo was done by using average conversion of each C, and finding subpopulations of structures for each oligo was done by clustering the reads instead of calculating the average conversion.

[0043] FIG. 8: Conversion differences among groups. Motifs of a secondary structure were classified into 3 groups: Flank, Stem, and Loop. When mean conversions of each C were grouped according to where the C is located, there are clear differences among three groups.

[0044] FIG. 9: Loop pattern 1. Mean conversions at Loop were grouped by the length of Loop when the length of Stem was always 20 nucleotides.

[0045] FIG. 10: Loop pattern 2. Mean conversion at Loop were plotted against the free energy of hybridization of their own Stem.

[0046] FIG. 11: Subpopulations. Conversions of an oligonucleotide that was designed to have two competing structures in equilibrium. All reads of an oligonucleotide were visualized by displaying converted C in white and unconverted C in black. Each row shows all C in one read, and each column shows specific position of C. The reads were sorted by conversions at 8^{th} and 9^{th} C.

### DETAILED DESCRIPTION

[0047] Provided herein are methods of bisulfite conversion, in which the conversion efficiency is intentionally designed to be low, so that differences in nucleotide accessibility (e.g., from being in a base-paired or protein-bound state) are reflected in bisulfite conversion yields.

[0048] Compared to prior bisulfite conversion methods, this disclosure intentionally uses lower bisulfite concentrations, shorter reaction times, and/or lower temperatures to reduce the yield of conversion. In particular, the goal of low bisulfite conversion yield is uniquely compatible with the goal of understanding native structures of nucleic acids at physiological conditions such as 37° C. and intracellular salinity conditions. These methods systematically use bisulfite conversion to characterize nucleotide accessibility, and the first reported method of analyzing low-yield bisulfite conversion products using NGS. Additionally, low-yield bisulfite conversion can be applied to the study of nucleotide accessibility for both DNA and RNA molecules. Because the majority of nucleic acid drug targets are mRNA molecules, because the majority of nucleic acid drugs are siRNAs or mRNAs, and because RNA has relatively fewer methylated cytosines that can obfuscate interpretation of conversion rates, low-yield bisulfite conversion may be well-suited for profiling RNA nucleotide accessibility to inform therapeutics development and characterization.

[0049] Compared to prior chemical probing methods for querying nucleotide accessibility such as SHAPE-Seq (Lucks et al., 2011), which effectively causes nucleic acid breaks preferentially at accessible nucleotides, this disclosure provides significantly higher throughput of information, because each NGS read simultaneously contributes information on the accessibility of multiple different cytosine nucleotides and furthermore does not have an information bias towards one end of the nucleic acid molecule. Furthermore, the low-yield bisulfite conversion method allows co-analysis of conversion rates of the same nucleotide under different bisulfite conversion reaction times in order to estimate the “depth” of structure or accessibility.

[0050] Applications of the disclosure include uses that help to inform the effectiveness of potential drugs or clarify biological pathways. DNA and RNA can act as both drug targets and as therapeutic molecules, so understanding the nucleotides that participate in different reactions is valuable to drug development. The secondary and tertiary structures of RNA can inform the design of new antibiotics, via information regarding accessibility of different ribosomal RNA targets. The secondary and tertiary structure information is also potentially important for new classes of RNA drugs, including lncRNA drugs. There is a large research use market for understanding secondary structure of RNA for design of in situ hybridization probes. Likewise, understanding the secondary structure of genomic DNA can inform the better design of PCR primers and hybrid-capture probes for genomics research and molecular diagnostics.

### I. BISULFITE CONVERSION

[0051] The term “bisulfite-converted DNA” as used herein refers to DNA that has been subjected to sodium bisulfite such that at least some of the unmethylated cytosines in the DNA are converted to uracil.

[0052] A typical bisulfite conversion reaction consists of three steps: sulfonation, deamination, and desulfonation. During sulfonation, a sulfonic acid functional group from a bisulfite ion replaces a hydrogen atom in cytosine, which causes spontaneous deamination of 6-sulfo-cytosine. In some embodiments, bisulfite exists in the form of sodium bisulfite. In some embodiments, the concentration of sodium bisulfite is approximately 5.0 M. In other embodiments, the concentration of sodium bisulfite is lower to control the rate of bisulfite conversion. For example, the concentration of sodium bisulfite may be 4.75 M, 4.5 M, 4.25 M, 4 M, 3.75 M, 3.5 M, 3.25 M, 3 M, 2.75 M, 2.5 M, 2.25 M, 2 M, 1.75 M, 1.5 M, 1.25 M, 1 M, 0.75 M, 0.5 M, 0.25 M, or 0.15 M. In some embodiments, pH is adjusted to 5.0 by adding NaOH. In some embodiments, antioxidants, such as hydroquinone, can be added to prevent DNA degradation by radicals. At the end of the desulfonation reaction, cytosine nucleotides are converted with some probability to uracil nucleotides. Cytosine nucleotides that are less accessible, for example due to being base paired or bound to a protein, are converted with a lower yield than more accessible cytosines.

[0053] In addition to the bisulfite concentration, the reaction time and temperature also affect the conversion yield. In some embodiments, the conversion is performed at 55° C. for 5 minutes or 20 minutes. In some embodiments, temperature is dropped to 4° C. at the end to slow down sulfonation and deamination before removing bisulfite. Bisulfite concentration can also be controlled to match salinity of interest. In one embodiment, the bisulfite solution was diluted and the conversion was performed at 98° C. for 5 minutes with fragmented Mycobacterium tuberculosis genomic DNA. The resulting conversion products were analyzed by NGS and the average conversion rate of all cytosines were as follows:

| [Bisulfite] | 5.00M | 4.75M | 4.50M | 4.25M | 4.00M | 3.75M | 3.5M |
|---|---|---|---|---|---|---|---|
| Conversion | 63.1% | 55.4% | 46.3% | 36.8% | 25.5% | 14.9% | 7.4% |

[0054] The desulfonation step removes the sulfonic acid functional group from 6-sulfo-uracil by increasing pH, resulting in uracil instead of cytosine. In some embodiments, desulfonation is performed by dissolving DNA into basic solution, such as 0.2 M NaOH. In some embodiments, desulfonation is performed at room temperature for 15 minutes.

### II. NEXT-GENERATION SEQUENCING (NGS)

[0055] The inventors use NGS to analyze bisulfite conversion yields in a high-throughput manner. The converted nucleic acid products are prepared into an NGS library via ligation or PCR addition of adapter sequences. In some embodiments, Illumina adapter sequences are first attached to target oligos after bisulfite conversion via ligation. In some embodiments, two oligos with the adapter sequences are attached to 5′-end and 3′-end of target by ligation. In some embodiments, the ligation is assisted by splint oligos, which hold a target oligo and two adapter oligos together to exploit the nick repair ability of DNA ligases. In some embodiments, a mixture of a target oligo, two splint oligos, and two adapter oligos are pre-annealed before a ligation. In some embodiments, a ligation is performed with T4 DNA ligase. In other embodiments, a ligation is performed with single-stranded DNA ligase and no splint oligos. In some embodiments, PCR is used to attach adapters and/or index sequences to the ligation product. An example workflow for creating an NGS library from the bisulfite conversion products is shown in FIG. 1. Note that uracil (U) nucleotides are either converted in the NGS library preparation process to thymine (T) nucleotides, or read by the NGS as thymine nucleotides during the bridge PCR or emulsion PCR pre-amplification process.

[0056] Any technique for sequencing nucleic acids known to those skilled in the art can be used in the methods of the present disclosure. DNA sequencing techniques include classic dideoxy sequencing reactions (Sanger method) using labeled terminators or primers and gel separation in slab or capillary, sequencing-by-synthesis using reversibly terminated labeled nucleotides, pyrosequencing, 454 sequencing, allele specific hybridization to a library of labeled oligonucleotide probes, sequencing-by-synthesis using allele specific hybridization to a library of labeled clones that is followed by ligation, real time monitoring of the incorporation of labeled nucleotides during a polymerization step, and SOLiD sequencing.

[0057] The nucleic acid library may be generated with an approach compatible with Illumina sequencing such as a Nextera™ DNA sample prep kit, and additional approaches for generating Illumina next-generation sequencing library preparation are described, e.g., in Oyola et al. (2012). In other embodiments, a nucleic acid library is generated with a method compatible with a SOLiD™ or Ion Torrent sequencing method (e.g., a SOLiD® Fragment Library Construction Kit, a SOLiD® Mate-Paired Library Construction Kit, SOLiD® ChIP-Seq Kit, a SOLiD® Total RNA-Seq Kit, a SOLiD® SAGE™ Kit, a Ambion® RNA-Seq Library Construction Kit, etc.). Additional methods for next-generation sequencing methods, including various methods for library construction that may be used with embodiments of the present disclosure are described, e.g., in Pareek (2011) and Thudi (2012).

[0058] In particular aspects, the sequencing technologies used in the methods of the present disclosure include the HiSeg™ system (e.g., HiSeg™ 2000 and HiSeg™ 1000) and the MiSeg™ system from Illumina, Inc. The HiSeg™ system is based on massively parallel sequencing of millions of fragments using attachment of randomly fragmented genomic DNA to a planar, optically transparent surface and solid phase amplification to create a high-density sequencing flow cell with millions of clusters, each containing about 1,000 copies of template per sq. cm. These templates are sequenced using four-color DNA sequencing-by-synthesis technology. The MiSeg™ system uses TruSeq™, Illumina's reversible terminator-based sequencing-by-synthesis.

[0059] Another example of a DNA sequencing platform is the QIAGEN GeneReader platform—a next generation sequencing (NGS) platform utilizing proprietary modified nucleotides whose 3′ OH groups are reversely terminated by a small moiety to perform sequencing-by-synthesis (SBS) in a massively parallel manner. Briefly, the sequencing templates are first clonally amplified on a solid surface (such as beads) to generate hundreds of thousands of identical copies for each individual sequencing template, denaturized to generate single-stranded sequencing templates, hybridized with sequencing primer, and then immobilized on the flow cell. The immobilized sequencing templates are then subjected to a nucleotide incorporation reaction in a reaction mix that includes modified nucleotides with a cleavable 3′ blocking group that enables the incorporation and detection of only one specific nucleotide onto each sequencing template in each cycle. See U.S. Pat. Nos. 6,664,079; 8,612,161; and 8,623,598, each of which is incorporated by reference herein.

[0060] Another example of a DNA sequencing platform is the Ion Torrent PGM™ sequencer (Thermo Fisher) and the Ion Torrent Proton™ Sequencer (Thermo Fisher), which are ion-based sequencing systems that sequence nucleic acid templates by detecting ions produced as a byproduct of nucleotide incorporation. Typically, hydrogen ions are released as byproducts of nucleotide incorporations occurring during template-dependent nucleic acid synthesis by a polymerase. The Ion Torrent PGM™ sequencer and Ion Proton™ Sequencer detect the nucleotide incorporations by detecting the hydrogen ion byproducts of the nucleotide incorporations. The Ion Torrent PGM™ sequencer and Ion Torrent Proton™ sequencer include a plurality of nucleic acid templates to be sequenced, each template disposed within a respective sequencing reaction well in an array. The wells of the array are each coupled to at least one ion sensor that can detect the release of H+ ions or changes in solution pH produced as a byproduct of nucleotide incorporation. The ion sensor comprises a field effect transistor (FET) coupled to an ion-sensitive detection layer that can sense the presence of H+ ions or changes in solution pH. The ion sensor provides output signals indicative of nucleotide incorporation, which can be represented as voltage changes whose magnitude correlates with the H+ ion concentration in a respective well or reaction chamber. Different nucleotide types are flowed serially into the reaction chamber, and are incorporated by the polymerase into an extending primer (or polymerization site) in an order determined by the sequence of the template. Each nucleotide incorporation is accompanied by the release of H+ ions in the reaction well, along with a concomitant change in the localized pH. The release of H+ ions is registered by the FET of the sensor, which produces signals indicating the occurrence of the nucleotide incorporation. Nucleotides that are not incorporated during a particular nucleotide flow will not produce signals. The amplitude of the signals from the FET may also be correlated with the number of nucleotides of a particular type incorporated into the extending nucleic acid molecule thereby permitting homopolymer regions to be resolved. Thus, during a run of the sequencer multiple nucleotide flows into the reaction chamber along with incorporation monitoring across a multiplicity of wells or reaction chambers permit the instrument to resolve the sequence of many nucleic acid templates simultaneously. Further details regarding the compositions, design and operation of the Ion Torrent PGM™ sequencer can be found, for example, in U.S. Pat. Publn. Nos. 2009/0026082; 2010/0137143; and 2010/0282617, all of which are incorporated by reference herein in their entireties.

[0061] Another example of a DNA sequencing technique that can be used in the methods of the present disclosure is 454 sequencing (Roche) (Margulies et al., 2005). 454 sequencing involves two steps. In the first step, DNA is sheared into fragments of approximately 300-800 base pairs, and the fragments are blunt ended. Oligonucleotide adaptors are then ligated to the ends of the fragments. The adaptors serve as primers for amplification and sequencing of the fragments. The fragments can be attached to DNA capture beads, e.g., streptavidin-coated beads using, e.g., Adaptor B, which contains 5′-biotin tag. The fragments attached to the beads are PCR amplified within droplets of an oil-water emulsion. The result is multiple copies of clonally amplified DNA fragments on each bead. In the second step, the beads are captured in wells (pico-liter sized). Pyrosequencing is performed on each DNA fragment in parallel. Addition of one or more nucleotides generates a light signal that is recorded by a CCD camera in a sequencing instrument. The signal strength is proportional to the number of nucleotides incorporated.

[0062] Another example of a DNA sequencing technique that can be used in the methods of the present disclosure is SOLiD technology (Life Technologies, Inc.). In SOLiD sequencing, genomic DNA is sheared into fragments, and adaptors are attached to the 5′ and 3′ ends of the fragments to generate a fragment library. Alternatively, internal adaptors can be introduced by ligating adaptors to the 5′ and 3′ ends of the fragments, circularizing the fragments, digesting the circularized fragment to generate an internal adaptor, and attaching adaptors to the 5′ and 3′ ends of the resulting fragments to generate a mate-paired library. Next, clonal bead populations are prepared in microreactors containing beads, primers, template, and PCR components. Following PCR, the templates are denatured and beads are enriched to separate the beads with extended templates. Templates on the selected beads are subjected to a 3′ modification that permits bonding to a glass slide.

[0063] Another example of a DNA sequencing technique that can be used in the methods of the present disclosure is the IonTorrent system (Life Technologies, Inc.). Ion Torrent uses a high-density array of micro-machined wells to perform this biochemical process in a massively parallel way. Each well holds a different DNA template. Beneath the wells is an ion-sensitive layer and beneath that a proprietary Ion sensor. If a nucleotide, for example a C, is added to a DNA template and is then incorporated into a strand of DNA, a hydrogen ion will be released. The charge from that ion will change the pH of the solution, which can be detected by the proprietary ion sensor. The sequencer will call the base, going directly from chemical information to digital information. The Ion Personal Genome Machine (PGM™) sequencer then sequentially floods the chip with one nucleotide after another. If the next nucleotide that floods the chip is not a match, no voltage change will be recorded and no base will be called. If there are two identical bases on the DNA strand, the voltage will be double, and the chip will record two identical bases called. Because this is direct detection—no scanning, no cameras, no light—each nucleotide incorporation is recorded in seconds.

[0064] Another example of a sequencing technology that can be used in the methods of the present disclosure includes the single molecule, real-time (SMRT™) technology of Pacific Biosciences. In SMRT™, each of the four DNA bases is attached to one of four different fluorescent dyes. These dyes are phospholinked. A single DNA polymerase is immobilized with a single molecule of template single stranded DNA at the bottom of a zero-mode waveguide (ZMW). A ZMW is a confinement structure which enables observation of incorporation of a single nucleotide by DNA polymerase against the background of fluorescent nucleotides that rapidly diffuse in and out of the ZMW (in microseconds). It takes several milliseconds to incorporate a nucleotide into a growing strand. During this time, the fluorescent label is excited and produces a fluorescent signal, and the fluorescent tag is cleaved off. Detection of the corresponding fluorescence of the dye indicates which base was incorporated. The process is repeated.

[0065] A further sequencing platform includes the CGA Platform (Complete Genomics). The CGA technology is based on preparation of circular DNA libraries and rolling circle amplification (RCA) to generate DNA nanoballs that are arrayed on a solid support (Drmanac et al. 2010). Complete genomics' CGA Platform uses a novel strategy called combinatorial probe anchor ligation (cPAL) for sequencing. The process begins by hybridization between an anchor molecule and one of the unique adapters. Four degenerate 9-mer oligonucleotides are labeled with specific fluorophores that correspond to a specific nucleotide (A, C, G, or T) in the first position of the probe. Sequence determination occurs in a reaction where the correct matching probe is hybridized to a template and ligated to the anchor using T4 DNA ligase. After imaging of the ligated products, the ligated anchor-probe molecules are denatured. The process of hybridization, ligation, imaging, and denaturing is repeated five times using new sets of fluorescently labeled 9-mer probes that contain known bases at the n+1, n+2, n+3, and n+4 positions.

[0066] A further sequencing platform includes nanopore sequencing (Oxford Nanopore). Nanopore detection arrays are described in US2011/0177498; US2011/0229877; US2012/0133354; WO2012/042226; WO2012/107778, and have been used for nucleic acid sequencing as described in US2012/0058468; US2012/0064599; US2012/0322679 and WO2012/164270, all of which are hereby incorporated by reference. A single molecule of DNA can be sequenced directly using a nanopore, without the need for an intervening PCR amplification step or a chemical labelling step or the need for optical instrumentation to identify the chemical label. Commercially available nanopore nucleic acid sequencing units are developed by Oxford Nanopore (Oxford, United Kingdom). The GridION™ system and miniaturised MinION™ device are designed to provide novel qualities in molecular sensing such as real-time data streaming, improved simplicity, efficiency and scalability of workflows and direct analysis of the molecule of interest. Using the Oxford Nanopore nanopore sequencing platform, an ionic current is passed through the nanopore by setting a voltage across this membrane. If an analyte passes through the pore or near its aperture, this event creates a characteristic disruption in current. Measurement of that current makes it possible to identify the molecule in question. For example, this system can be used to distinguish between the four standard DNA bases G, A, T and C, and also modified bases. It can be used to identify target proteins, small molecules, or to gain rich molecular information, for example to distinguish between the enantiomers of ibuprofen or study molecular binding dynamics. These nanopore arrays are useful for scientific applications specific for each analyte type; for example, when sequencing DNA, the technology may be used for resequencing, de novo sequencing, and epigenetics.

### III. NEXT-GENERATION SEQUENCING DATA ANALYSIS

[0067] One embodiment of an algorithm to analyze NGS reads from FASTA files starts with sequence alignment. First, C and T nucleotides from all reads and reference sequences are converted to Y to handle any degree of bisulfite conversion. The NGS reads are then aligned to the reference sequences to determine which original nucleic acid molecule and positions the NGS reads correspond to. In some embodiments, alignment is performed using software such as Bowtie 2 to account for potential sequencing errors. In some embodiments, alignment is performed using software based on an exact match, such as through hash tables, suffix trees, or the Boyer-Moore algorithm. After aligning the NGS reads to reference sequences, the conversion rate of each nucleotide position that was originally a C is calculated by dividing the number of reads with a T at that position divided by the sum of the number of reads with a T or a C at that position.

### IV. DEFINITIONS

[0068] A “target nucleic acid,” as used herein, is any nucleic acid having a known or partially known sequence for which low-yield bisulfite conversion analysis is desired. A target nucleic acid can be a single nucleic acid molecule or a plurality of nucleic acid molecules. Also, a target nucleic acid molecule can be of biological or synthetic origin. Examples of nucleic acid molecules include genomic DNA, cDNA, RNA, amplified DNA, a pre-existing nucleic acid library, etc. Nucleic acids in a nucleic acid sample being analyzed (or processed) in accordance with the present disclosure can be from any nucleic acid source. As such, nucleic acids in a nucleic acid sample can be from virtually any nucleic acid source, including but not limited to genomic DNA, complementary DNA (cDNA), RNA (e.g., messenger RNA, ribosomal RNA, short interfering RNA, microRNA, etc.), plasmid DNA, mitochondrial DNA, etc. Furthermore, as any organism can be used as a source of nucleic acids to be processed in accordance with the present disclosure, no limitation in that regard is intended. Exemplary organisms include, but are not limited to, plants, animals (e.g., reptiles, mammals, insects, worms, fish, etc.), bacteria, fungi (e.g., yeast), viruses, etc. In certain embodiments, the nucleic acids in the nucleic acid sample are derived from a mammal, where in certain embodiments the mammal is a human. A nucleic acid molecule of interest can be a single nucleic acid molecule or a plurality of nucleic acid molecules. Also, a target nucleic acid molecule can be of biological or synthetic origin. Examples of nucleic acid molecules include genomic DNA, cDNA, cell-free DNA (cfDNA), RNA, amplified DNA, a pre-existing nucleic acid library, etc. In some aspects, the target nucleic acid is a double-stranded DNA molecule, such as, for example, human genomic DNA.

[0069] “Amplification,” as used herein, refers to any in vitro process for increasing the number of copies of a nucleotide sequence or sequences. Nucleic acid amplification results in the incorporation of nucleotides into DNA or RNA. As used herein, one amplification reaction may consist of many rounds of DNA replication. For example, one PCR reaction may consist of 30-100 “cycles” of denaturation and replication.

[0070] “Polymerase chain reaction,” or “PCR,” means a reaction for the in vitro amplification of specific DNA sequences by the simultaneous primer extension of complementary strands of DNA. In other words, PCR is a reaction for making multiple copies or replicates of a target nucleic acid flanked by primer binding sites, such reaction comprising one or more repetitions of the following steps: (i) denaturing the target nucleic acid, (ii) annealing primers to the primer binding sites, and (iii) extending the primers by a nucleic acid polymerase in the presence of nucleoside triphosphates. Usually, the reaction is cycled through different temperatures optimized for each step in a thermal cycler instrument. Particular temperatures, durations at each step, and rates of change between steps depend on many factors well-known to those of ordinary skill in the art, e.g., exemplified by the references: McPherson et al., editors, PCR: A Practical Approach and PCR2: A Practical Approach (IRL Press, Oxford, 1991 and 1995, respectively).

[0071] “Primer” means an oligonucleotide, either natural or synthetic that is capable, upon forming a duplex with a polynucleotide template, of acting as a point of initiation of nucleic acid synthesis and being extended from its 3′ end along the template so that an extended duplex is formed. The sequence of nucleotides added during the extension process is determined by the sequence of the template polynucleotide. Usually primers are extended by a DNA polymerase. Primers are generally of a length compatible with its use in synthesis of primer extension products, and are usually are in the range of between 8 to 100 nucleotides in length, such as 10 to 75, 15 to 60, 15 to 40, 18 to 30, 20 to 40, 21 to 50, 22 to 45, 25 to 40, and so on, more typically in the range of between 18-40, 20-35, 21-30 nucleotides long, and any length between the stated ranges. Typical primers can be in the range of between 10-50 nucleotides long, such as 15-45, 18-40, 20-30, 21-25 and so on, and any length between the stated ranges. Primers may be no more than about 10, 12, 15, 20, 21, 22, 23, 24, 25, 26, 27, 28, 29, 30, 35, 40, 45, 50, 55, 60, 65, or 70 nucleotides in length.

[0072] The term “PCR” encompasses derivative forms of the reaction, including but not limited to, RT-PCR, real-time PCR, nested PCR, quantitative PCR, multiplexed PCR, assembly PCR and the like. Reaction volumes range from a few hundred nanoliters, e.g., 200 nL, to a few hundred microliters, e.g., 200 μL. “Reverse transcription PCR,” or “RT-PCR,” means a PCR that is preceded by a reverse transcription reaction that converts a target RNA to a complementary single stranded DNA, which is then amplified, e.g., Tecott et al., U.S. Pat. No. 5,168,038. “Real-time PCR” means a PCR for which the amount of reaction product, i.e., amplicon, is monitored as the reaction proceeds. There are many forms of real-time PCR that differ mainly in the detection chemistries used for monitoring the reaction product, e.g., Gelfand et al., U.S. Pat. No. 5,210,015 (“Taqman”); Wittwer et al., U.S. Pat. Nos. 6,174,670 and 6,569,627 (intercalating dyes); Tyagi et al., U.S. Pat. No. 5,925,517 (molecular beacons). Detection chemistries for real-time PCR are reviewed in Mackay et al., Nucleic Acids Research, 30:1292-1305 (2002). “Nested PCR” means a two-stage PCR wherein the amplicon of a first PCR becomes the sample for a second PCR using a new set of primers, at least one of which binds to an interior location of the first amplicon. As used herein, “initial primers” in reference to a nested amplification reaction mean the primers used to generate a first amplicon, and “secondary primers” mean the one or more primers used to generate a second, or nested, amplicon. “Multiplexed PCR” means a PCR wherein multiple target sequences (or a single target sequence and one or more reference sequences) are simultaneously carried out in the same reaction mixture, e.g. Bernard et al. (1999) Anal. Biochem., 273:221-228 (two-color real-time PCR). Usually, distinct sets of primers are employed for each sequence being amplified. “Quantitative PCR” means a PCR designed to measure the abundance of one or more specific target sequences in a sample or specimen. Techniques for quantitative PCR are well-known to those of ordinary skill in the art, as exemplified in the following references: Freeman et al., Biotechniques, 26:112-126 (1999); Becker-Andre et al., Nucleic Acids Research, 17:9437-9447 (1989); Zimmerman et al., Biotechniques, 21:268-279 (1996); Diviacco et al., Gene, 122:3013-3020 (1992); Becker-Andre et al., Nucleic Acids Research, 17:9437-9446 (1989); and the like.

[0073] Varied choices of polymerases exist with different properties, such as temperature, strand displacement, and proof-reading. Amplification can be isothermal, such as multiple displacement amplification (MDA) described by Dean et al., Comprehensive human genome amplification using multiple displacement amplification, Proc. Natl. Acad. Sci. U.S.A., vol. 99, p. 5261-5266. 2002; also Dean et al., Rapid amplification of plasmid and phage DNA using phi29 DNA polymerase and multiply-primed rolling circle amplification, Genome Res., vol. 11, p. 1095-1099. 2001; also Aviel-Ronen et al., Large fragment Bst DNA polymerase for whole genome amplification of DNA formalin-fixed paraffin-embedded tissues, BMC Genomics, vol. 7, p. 312. 2006. Amplification can also cycle through different temperature regiments, such as the traditional polymerase chain reaction (PCR) popularized by Mullis et al., Specific enzymatic amplification of DNA in vitro: The polymerase chain reaction. Cold Spring Harbor Symp. Quant. Biol., vole 51, p. 263-273. 1986. Other methods include Polony PCR described by Mitra and Church, In situ localized amplification and contact replication of many individual DNA molecules, Nuc. Acid. Res., vole 27, pages e34. 1999; emulsion PCR (ePCR) described by Shendure et al., Accurate multiplex polony sequencing of an evolved bacterial genome, Science, vol. 309, p. 1728-32. 2005; and Williams et al., Amplification of complex gene libraries by emulsion PCR, Nat. Methods, vol. 3, p. 545-550. 2006. Any amplification method can be combined with a reverse transcription step, a priori, to allow amplification of RNA. According to certain aspects, amplification is not absolutely required since probes, reporters and detection systems with sufficient sensitivity can be used to allow detection of a single molecule using template non-hybridizing nucleic acid structures described. Ways to adapt sensitivity in a system include choices of excitation sources (e.g. illumination) and detection (e.g. photodetector, photomultipliers). Ways to adapt signal level include probes allowing stacking of reporters, and high intensity reporters (e.g. quantum dots) can also be used.

[0074] Exemplary methods for amplifying nucleic acids include the polymerase chain reaction (PCR) (see, e.g., Mullis et al. (1986) Cold Spring Harb. Symp. Quant. Biol. 51 Pt 1:263 and Cleary et al. (2004) Nature Methods 1:241; and U.S. Pat. Nos. 4,683,195 and 4,683,202), anchor PCR, RACE PCR, ligation chain reaction (LCR) (see, e.g., Landegran et al. (1988) Science 241:1077-1080; and Nakazawa et al. (1994) Proc. Natl. Acad. Sci. U.S.A. 91:360-364), self sustained sequence replication (Guatelli et al. (1990) Proc. Natl. Acad. Sci. U.S.A. 87:1874), transcriptional amplification system (Kwoh et al. (1989) Proc. Natl. Acad. Sci. U.S.A. 86:1173), Q-Beta Replicase (Lizardi et al. (1988) BioTechnology 6:1197), recursive PCR (Jaffe et al. (2000) J. Biol. Chem. 275:2619; and Williams et al. (2002) J. Biol. Chem. 277:7790), the amplification methods described in U.S. Pat. Nos. 6,391,544, 6,365,375, 6,294,323, 6,261,797, 6,124,090 and 5,612,199, isothermal amplification (e.g., rolling circle amplification (RCA), hyperbranched rolling circle amplification (HRCA), strand displacement amplification (SDA), helicase-dependent amplification (HDA), PWGA) or any other nucleic acid amplification method using techniques well known to those of skill in the art.

[0075] As used herein in relation to a nucleotide sequence, “substantially known” refers to having sufficient sequence information in order to permit preparation of a nucleic acid molecule, including its amplification. This will typically be about 100%, although in some embodiments some portion of an adaptor sequence is random or degenerate. Thus, in specific embodiments, substantially known refers to about 50% to about 100%, about 60% to about 100%, about 70% to about 100%, about 80% to about 100%, about 90% to about 100%, about 95% to about 100%, about 97% to about 100%, about 98% to about 100%, or about 99% to about 100%.

### V. KITS

[0076] The technology herein includes kits for performing bisulfite conversion and generating sequencing libraries. A “kit” refers to a combination of physical elements. For example, a kit may include, for example, one or more components, such as specific primers, enzymes, reaction buffers, an instruction sheet, and other elements useful to practice the technology described herein. These physical elements can be arranged in any way suitable for carrying out the disclosure.

[0077] The components of the kits may be packaged either in aqueous media or in lyophilized form. The container means of the kits will generally include at least one vial, test tube, flask, bottle, syringe or other container means, into which a component may be placed, and preferably, suitably aliquoted (e.g., aliquoted into the wells of a microtiter plate). Where there is more than one component in the kit, the kit also will generally contain a second, third or other additional container into which the additional components may be separately placed. However, various combinations of components may be comprised in a single vial. The kits of the present disclosure also will typically include a means for containing the nucleic acids, and any other reagent containers in close confinement for commercial sale. Such containers may include injection or blow molded plastic containers into which the desired vials are retained.

[0078] A kit will also include instructions for employing the kit components as well the use of any other reagent not included in the kit. Instructions may include variations that can be implemented. It is contemplated that such reagents are embodiments of kits of the disclosure. Such kits, however, are not limited to the particular items identified above.

### VI. EXAMPLES

[0079] The following examples are included to demonstrate preferred embodiments of the invention. It should be appreciated by those of skill in the art that the techniques disclosed in the examples which follow represent techniques discovered by the inventor to function well in the practice of the invention, and thus can be considered to constitute preferred modes for its practice. However, those of skill in the art should, in light of the present disclosure, appreciate that many changes can be made in the specific embodiments which are disclosed and still obtain a like or similar result without departing from the spirit and scope of the invention.

### Example 1—Structure Validation Via Low-Yield Bisulfite Conversion

[0080] To independently experimentally validate whether the predicted structures based on TEEM parameters are more accurate than the standard parameters, a new method for chemically probing DNA structure was developed. Bisulfite conversion is a chemical process in which unmethylated cytosine (C) nucleotides are converted into uracil (U) nucleotides, and has been typically used for studying epigenetic modification. Literature reports have suggested that strong secondary structures can adversely affect the efficiency of bisulfite conversion, so it was hypothesized that even weak secondary structures could potentially be distinguished via different bisulfite conversion efficiencies, if the reaction time and conditions were modified to reduce overall conversion yield. Use of next-generation sequencing (NGS) to analyze the converted DNA oligos allows highly precise quantitation of conversion efficiencies at single-molecule and single-nucleotide resolution (FIG. 1).

[0081] To validate the ability for low-yield bisulfite conversion to capture nucleotide base-pair states (i.e., accessibility), a control oligonucleotide (Oligo 4) that contains a single well-defined minimum free energy structure predicted identically by both the TEEM and SantaLucia thermodynamic parameters was rationally designed. Oligo 4 was subject to a 5 min bisulfite conversion reaction at 55° C., using a standard solution of 5 M sodium bisulfite. Analysis of the NGS reads for this oligo after the sodium bisulfite reaction showed that C nucleotides at different positions were converted with between 1% and 46% efficiency (based on the fraction of NGS reads showing C vs. T at the position, FIG. 2). Importantly, all 14 C nucleotides predicted to be in unpaired states showed high (>30%) conversion rates, and all 16 C nucleotides predicted to be in paired states showed low (<20%) conversion rates. This result unambiguously shows that low-yield bisulfite conversion rate is strongly correlated with the likelihood at equilibrium of finding the nucleotide in an unpaired state.

[0082] Interestingly, the closing nucleotides of the hairpin stem in Oligo 1 exhibit significantly higher conversion rates than other nucleotides in the hairpin stem, with conversion rates of 13% and 17%, compared to no higher than 5.2% for nucleotides more internal to the hairpin stem. This implies that bisulfite conversion is a dynamic process—as closing nucleotides of the hairpin stem are converted and become unpaired, the more interior bases now become closer to the ends of the stem, and more accessible to chemical reaction. Thus, a time series of the target nucleic acid subject to differing durations of bisulfite conversion can provide an additional layer of information regarding the “depth” of the structure that a nucleotide participates in. FIG. 3 supports this interpretation; in the 20-minute conversion reaction at 37° C., a graded conversion rate was observed where nucleotides deeper and deeper in to the hairpin stem have successively lower conversion rates.

[0083] The inferred accessibility of different C nucleotides based on low-yield bisulfite conversion rates can be used to inform nucleic acid structures. In some embodiments, low-yield bisulfite conversion and NGS results can be used to favor one of multiple proposed structures for the same nucleic acid molecule. To this end, low-yield bisulfite conversion was performed on the 3 sequences described in FIGS. 4A-C. For example, FIG. 4B shows the predicted structure of a subsequence of the SMARCA4 gene, with the left structure using one set of published thermodynamics parameters, and the right structure using a different set of thermodynamics parameters. The C nucleotides in each oligo sequence were grouped into either predicted paired (PP) or predicted unpaired (PU), based on the TEEM parameters or the SantaLucia 2004 parameters. The PP nucleotides thus should exhibit lower bisulfite conversion yield than the PU nucleotides in the correct structure. Under TEEM parameters, the PP nucleotides exhibited a statistically significant lower mean conversion rate than PU nucleotides (p=8×10⁻⁵ via Mann-Whitney U test) (FIG. 5A). In contrast, under SantaLucia parameters, PP and PU nucleotides do not exhibit a statistically significant difference in the mean conversion rate (p=0.12) (FIG. 5B). Low-yield bisulfite conversion was also performed for 20 minutes at 55° C. rather than 5 minutes, and the results are similar, with TEEM parameter PP and PU nucleotides being statistically different in mean conversion rates (p=5×10⁻⁵), but not the SantaLucia ones (p=0.14). Thus, the low-yield bisulfite conversion method supports TEEM thermodynamic parameters as predicting the base pair status of nucleotides in an oligo more accurately than literature parameters.

[0084] The quantitative difference between conversion rates for PP and PU nucleotides (TEEM parameters) is smaller than the difference in conversion rates for Oligo 4 (FIG. 2). This is not unexpected, as the duplex stems in the MFE structures for Oligos 1, 2, and 3 are significantly shorter than for Oligo 4. Base pairs near the ends of duplex stems are prone to base breathing, and thus spend a greater fraction of the time in a single-stranded state, resulting in higher bisulfite conversion rates. For example, the two C nucleotides that were closing base pairs of the duplex stem in Oligo 4 exhibited conversion yields of 13% and 17%, compared to all other paired C nucleotides with less than 6% conversion rate.

[0085] The TEEM method for thermodynamic characterization of DNA motifs is significantly higher throughput than all previous methods, and simultaneously is more precise (Table 1). These improved capabilities allow for the accurate measurement of the ΔΔG° of motifs, such as bulges and mismatch bubbles, across a wide temperature range, which lead to the realization that previously reported ΔH° and ΔS° were inaccurately extrapolated from DNA melt experiments. These studies uncovered a new molecular biophysical phenomenon: that almost all destabilizing DNA motifs are driven primarily by enthalpy. Further theoretical studies and molecular dynamics modeling is needed to understand the fundamental biophysics of DNA folding and hybridization.

TABLE 1
Comparison of DNA thermodynamics measurement methods

| | Throughput | ΔG° | | | Valid | |
|---|---|---|---|---|---|---|
| | (# of | standard | DNA | | Temp. | |
| Method | ΔG° values) | error | conc. | | Range | |
| UV Melt Analysis | 31/plate | 0.4 kcal/mol | 1 | μM | 5° | C. |
| High Resolution | 31/plate | 1.0 kcal/mol | 0.2 | μM | 5° | C. |
| Melt | | | | | | |
| Isothermal | 1/cell | 0.1 kcal/mol | 5000 | μM | 1° | C. |
| Titration Calo- | | | | | | |
| rimetry (ITC) | | | | | | |
| Differential | 1/cell | 0.1 kcal/mol | 100 | μM | 5° | C. |
| Scanning Calo- | | | | | | |
| rimetry (DSC) | | | | | | |
| TEEM | 1200/plate | 0.05 kcal/mol | 1 | μM | 40+° | C. |

[0086] It is surprising that DNA thermodynamics, which have been characterized systematically in many studies starting 35 years ago, can have glaring inaccuracies and undiscovered phenomenon. To support the validity of these conclusions, this new method was rigorously verified via a series of measurements of the same DNA motif in different contexts, which were systematically replicated to minimize statistical error (at least 9 replicate experiments for each motif). Based on these results, the phenomenon observed is indeed reflective of natural biophysics.

[0087] The accuracy of TEEM results relies upon the assumption that the motif ΔΔG° can be approximated as the difference of reaction ΔG° values, which holds true when the single-stranded reference and variant DNA sequences exhibit similar folding energies. Insofar as DNA folding software rely on imperfect thermodynamic parameters, the measured ΔΔG° values for any particular set of sequences may differ from objectively true values by a small amount. However, this systematic bias should not be temperature dependent, so the conclusion regarding the temperature invariance of ΔΔG° for DNA destabilization motifs should hold. Furthermore, these experiments on several independent DNA sequences with the same motif showed variation of less than 0.1 kcal/mol, indicating that any error is likely small.

[0088] Using the TEEM characterized thermodynamic parameters for bulges and mismatches in DNA folding software resulted in different predicted structures and/or energies in 60% of biological sequences analyzed at 55° C. Furthermore, a consistent bias to more predicted structure at lower temperatures and less predicted structure at higher temperatures was observed. The NUPACK parameter files have been made publicly available so that the updated software can be used in guiding DNA probe and primer design.

[0089] Provided herein are methods for probing with high resolution the base pairing state of each cytosine in an oligonucleotide, using low-yield bisulfite conversion and downstream NGS. In addition to independently validating the correctness of TEEM thermodynamics parameters, it is envisioned that low-yield bisulfite conversion can be a powerful new tool for analyzing the secondary and tertiary structure of nucleic acids. Compared to similar chemical probing methods such as SHAPE-Seq (Lucks et al., 2011), the present method provides higher information throughput, because each NGS read simultaneously reports on the base pair status of multiple nucleotides. On the other hand, the present methods are limited in being only capable of probing C nucleotides, and thus may be unsuitable for A/T-rich sequences.

[0090] Although the TEEM thermodynamics parameters result in improved DNA secondary structure prediction over published parameters, the imperfect anti-correlation between predicted base pair probability and bisulfite conversion rate suggests that there remain many inaccuracies in the thermodynamics parameters even with the TEEM parameter updates. For example, there are very likely still inaccuracies in the thermodynamics of hairpin loops and multiloops. Adaptation and optimization of the TEEM method may allow a systematic and comprehensive profiling of these other hybridization motifs, which could lead to even better secondary structure prediction.

### Example 2—Oligo Sequences and Concentrations Used

[0091] Table 2 lists the sequences of the DNA oligonucleotides used for demonstration of low-yield bisulfite conversion. R nucleotides indicate that the oligo was synthesized as a degenerate randomer sequence with roughly equal probability of each nucleotide being A or G at the R position.

TABLE 2
Sequences of DNA oligonucleotides

| Name | Sequence | Conc. |
|---|---|---|
| Hairpin oligo | Phosphate- | 6.7 nM |
| (Oligo 1) | CGCCTGGATGCCACAGCCAGCCGTGAGCATAGCCCGCGCTAGTCA | |
| | GTCATGGTGACCGTCACGTGGCTGCGCGTGGTTGCCATGTGGCCT | |
| | TTGGGTGGCT (SEQ ID NO: 1) | |
| Oligo 2 | Phosphate- | 6.7 nM |
| | GGCCGAGGGTGGCACGCACAGCACACCTCTCCAGCTAGTGTCAGA | |
| | GGCCACCTTCCCTTTTATGACCTCCTGGGCTCCTTTGGGACTGAC | |
| | TGGCACCTCT (SEQ ID NO: 2) | |
| 5-Adapter | ACACTCTTTCCCTACACGACGCTCTTCCGATCT | 40 nM |
| | (SEQ ID NO: 3) | |
| 3-Adapter | Phosphate-AGATCGGAAGAGCACACGTCTGAACTCCAGTC- | 40 nM |
| | C3spacer (SEQ ID NO: 4) | |
| 5-Splint | ARRTRTAACRAACRTAGATCGGAAGAGCGT (SEQ ID NO: 5) | 120 nM |
| Oligo1 | | |
| 5-Splint | RTRCCACCCTCRRCCAGATCGGAAGAGCGT (SEQ ID NO: 6) | 102 nM |
| Oligo2 | | |
| 3-Splint | GTGCTCTTCCGATCTARTCRRTRACRAATT (SEQ ID NO: 7) | 60 nM |
| Oligo1 | | |
| 3-Splint | GTGCTCTTCCGATCTARARRTRCCARTCAR (SEQ ID NO: 8) | 120 nM |
| Oligo2 | | |

### Example 3—Next-Generation Sequencing (NGS) Data Summary

[0092] Tables 3-4 summarize the number of reads that are C vs. T at each position for each oligo tested. The position of the nucleotide indicates where the C is in the hairpin oligo, counting from the 5′-end. C indicates that bisulfite conversion did not occur, and T indicates that bisulfite conversion did occur.

TABLE 3
NGS on hairpin oligo (Oligo 4)*

| | Position of nucleotide | | | | | | |
|---|---|---|---|---|---|---|---|
| | 2 | 6 | 11 | 13 | 14 | 16 | 18 |
| C | 462,288 | 482,716 | 478,274 | 510,533 | 533,688 | 675,282 | 748,601 |
| T | 310,770 | 290,342 | 294,784 | 262,525 | 239,370 | 97,776 | 24,457 |
| | Position of nucleotide | | | | | | |
| | 20 | 22 | 24 | 25 | 28 | 31 | 32 |
| C | 758,972 | 762,819 | 761,009 | 764,000 | 762,477 | 742,296 | 736,272 |
| T | 14,086 | 10,239 | 12,049 | 9,058 | 10,581 | 30,762 | 36,786 |
| | Position of nucleotide | | | | | | |
| | 34 | 36 | 38 | 39 | 41 | 44 | 45 |
| C | 477,699 | 520,677 | 534,556 | 519,445 | 641,325 | 750,402 | 758,908 |
| T | 295,359 | 252,381 | 238,502 | 253,613 | 131,733 | 22,656 | 14,150 |
| | Position of nucleotide | | | | | | |
| | 47 | 51 | 55 | 57 | 63 | 66 | 68 |
| C | 762,155 | 761,999 | 757,764 | 732,983 | 446,582 | 443,708 | 443,706 |
| T | 10,903 | 11,059 | 15,294 | 40,075 | 326,476 | 329,350 | 329,352 |

| | Position of nucleotide | |
|---|---|---|
| | 69 | 72 |
| C | 447,470 | 416,863 |
| T | 325,588 | 356,195 |

*5 min bisulfite conversion, n = 773,058 NGS reads

TABLE 4
NGS on Oligo 2*

| | Position of nucleotide | | | | | | |
|---|---|---|---|---|---|---|---|
| | 3 | 4 | 13 | 15 | 17 | 19 | 22 |
| C | 69,673 | 74,903 | 74,573 | 74,762 | 75,553 | 74,588 | 76,850 |
| T | 40,830 | 35,600 | 35,930 | 35,741 | 34,950 | 35,915 | 33,653 |
| | Position of nucleotide | | | | | | |
| | 24 | 26 | 27 | 29 | 31 | 32 | 35 |
| C | 75,668 | 74,720 | 76,596 | 72,436 | 72,935 | 77,089 | 70,819 |
| T | 34,835 | 35,783 | 33,907 | 38,067 | 37,568 | 33,414 | 39,684 |
| | Position of nucleotide | | | | | | |
| | 42 | 48 | 49 | 51 | 52 | 55 | 56 |
| C | 72,222 | 72,733 | 77,677 | 74,806 | 74,748 | 69,530 | 71,024 |
| T | 38,281 | 37,770 | 32,826 | 35,697 | 35,755 | 40,973 | 39,479 |
| | Position of nucleotide | | | | | | |
| | 57 | 66 | 67 | 69 | 70 | 75 | 77 |
| C | 72,308 | 70,361 | 72,168 | 70,380 | 72,633 | 67,973 | 69,493 |
| T | 38,195 | 40,142 | 38,335 | 40,123 | 37,870 | 42,530 | 41,010 |
| | Position of nucleotide | | | | | | |
| | 78 | 86 | 90 | 94 | 96 | 97 | 99 |
| C | 72,191 | 64,776 | 57,787 | 55,588 | 60,377 | 62,406 | 58,941 |
| T | 38,312 | 45,727 | 52,716 | 54,915 | 50,126 | 48,097 | 51,562 |

*5 min bisulfite conversion, n = 110,503 NGS reads

### Example 4—Population Analysis Via Low-Yield Bisulfite Conversion

[0093] Starting from a pool of 1,967 oligonucleotides (SEQ ID NOS: 10-1978), which were all 150 nucleotides long, PCR was performing with one of the primers having a dU at its 3′ end and three phosphorothioate bonds at its 5′ end (see FIG. 6). The resulting amplicons had both USER and BciVI restriction sites. After using BciVI, Lambda exonuclease, and USER, primer binding regions were removed leaving only the 100 nucleotide-long area of interest. Low-yield bisulfite conversion was then performed, followed by two ligation steps to attach NGS adaptors with the help of random hexamers on the guiding oligos. NGS library preparation was finished by running index PCR.

[0094] An example of the data processing methods is shown in FIG. 7. As shown, the NGS library generated 5.3 million raw reads with some of the C converted to T as a result of low-yield bisulfite conversion. For alignment purpose, all C and T were written as Y temporarily in both the raw reads and the reference sequences. After selecting only perfectly aligned reads, 2.6 million reads were left with the median read depth of 603x. All C and T were then recovered from Y. To make data processing faster and more efficient, C converted to T during low-yield bisulfite conversion was treated as 1 whereas C unconverted to T was treated as 0. Finding the dominant structure of an oligo was done by using average conversion of each C, and finding subpopulations of structures for each oligo was done by clustering the reads instead of calculating the average conversion.

[0095] Motifs of a secondary structure were classified into three groups: Flank, Stem, and Loop. When mean conversions of each C were grouped according to where the C is located, there were clear differences among three groups (FIG. 8). Conversions at Stem were much lower than those at Flank because Cs in the Stem are paired and less exposed to bisulfite solution. On the other hand, conversions at Loop were much higher, which makes it possible to distinguish loop structures from other unpaired and open structures.

[0096] Mean conversions at Loop were grouped by the length of Loop when the length of Stem was always 20 nucleotides. Conversion at Loop were affected by the length of the loop (FIG. 9). As the length of a loop gets longer, the characteristic high conversions gradually disappear. Conversions at Loop longer than 20 nucleotides did not show any significant difference from conversions at Flank.

[0097] In addition, mean conversion at Loop were plotted against the free energy of hybridization of their own Stem. Stronger Stems showed higher conversions in general (FIG. 10), and this conversion pattern can be used to predict a structure of an oligonucleotide.

[0098] Conversions of an oligonucleotide that was designed to have two competing structures in equilibrium are shown in FIG. 11. All reads of the oligonucleotide were visualized by displaying converted C in white and unconverted C in black. Each row shows all C in one read, and each column shows specific positions of C. When the reads were sorted by conversions at the 8^{th} and 9^{th} Cs, it became clear that conversions at the 18^{th} and 19^{th} Cs did not happen when either the 8^{th} or 9^{th} C were converted. Because the 8^{th} and 9^{th} Cs had to compete with 18^{th} and 19^{th} Cs to form a hairpin stem structure, they were mutually exclusive. Black columns in the middle shows the Cs that were on Stem in both structures.

[0099] All of the methods disclosed and claimed herein can be made and executed without undue experimentation in light of the present disclosure. While the compositions and methods of this invention have been described in terms of preferred embodiments, it will be apparent to those of skill in the art that variations may be applied to the methods and in the steps or in the sequence of steps of the method described herein without departing from the concept, spirit and scope of the invention. More specifically, it will be apparent that certain agents which are both chemically and physiologically related may be substituted for the agents described herein while the same or similar results would be achieved. All such similar substitutes and modifications apparent to those skilled in the art are deemed to be within the spirit, scope and concept of the invention as defined by the appended claims.

### REFERENCES

[0100] The following references, to the extent that they provide exemplary procedural or other details supplementary to those set forth herein, are specifically incorporated herein by reference.
[0101] Lucks et al., “Multiplexed RNA structure characterization with selective 2′-hydroxyl acylation analyzed by primer extension sequencing (SHAPE-Seq),” Proc. Natl. Acad. Sci. U.S.A., 108:11063-11068, 2011.

1. A method for low-yield conversion of unmethylated cytosine nucleotides to uracil (U) nucleotides in a target nucleic acid molecule, the method comprising:
(a) introducing a bisulfite solution to a sample comprising the target nucleic acid molecule to achieve a final bisulfite concentration of between 0.1 M and 10 M;
(b) allowing the bisulfite conversion to react a temperature between 4° C. and 70° C.;
(c) stopping the bisulfite conversion reaction through removal of the excess bisulfite; and
(d) performing desulfonation.

2. The method of claim 1, wherein unmethylated cytosines that do not participate in base pairing have a C to U conversion rate of no more than 90%.

3. The method of claim 1, wherein the bisulfite concentration is between 4 M and 10 M, and the reaction proceeds at a temperature between 4° C. and 55° C. for between 1 minute and 60 minutes.

4. The method of claim 1, wherein the bisulfite concentration is between 4 M and 10 M, and the reaction proceeds at a temperature between 45° C. and 70° C. for between 10 seconds and 20 minutes.

5. The method of claim 1, wherein the bisulfite concentration is between 0.5 M and 5 M, and the reaction proceeds at a temperature between 45° C. and 70° C. for between 5 minutes and 60 minutes.

6. The method of claim 1, wherein the bisulfite concentration is between 0.1 M and 1 M, and the reaction proceeds at a temperature between 37° C. and 70° C. for between 30 minutes and 12 hours.

7. The method of claim 1, wherein the target nucleic acid molecule is DNA.

8. The method of claim 1, wherein the target nucleic acid molecule is RNA.

9. The method of claim 1, wherein the bisulfite conversion is stopped by separating the bisulfite from the target nucleic acid.

10. (canceled)

11. The method of claim 1, wherein desulfonation is performed at a pH over 12.

12. A method of determining a nucleotide accessibility status of cytosine (C) nucleotides in a target nucleic acid molecule, the method comprising:
(a) performing a low-yield bisulfite conversion reaction to convert a fraction of cytosine nucleotides in a population of the target nucleic acid molecules to uracil (U) nucleotides;
(b) analyzing the converted nucleic acid molecules at each nucleotide position originally known to be a cytosine, to determine or estimate a conversion fraction of all molecules of the population that is converted at each nucleotide position originally known to be a cytosine; and
(c) mapping the conversion fraction to a nucleotide accessibility status.

13. The method of claim 12, wherein analyzing comprises sequencing the converted nucleic acid molecules.

14-15. (canceled)

16. The method of claim 13, wherein the fraction of all molecules of a target nucleic acid that are read as thymine (T) or uracil (U) at a given nucleotide is computed or estimated from sequencing data.

17-18. (canceled)

19. The method of claim 12, wherein mapping the conversion fraction to nucleotide accessibility status comprises comparing the conversion fraction at a C nucleotide position to conversion fractions of all other C nucleotide positions in the same nucleic acid species.

20. The method of claim 12, wherein mapping the conversion fraction to nucleotide accessibility status comprises comparing the conversion fraction at a C nucleotide position to conversion fractions of all other C nucleotide positions in the other all nucleic acid species within the same multiplexed conversion reaction.

21. The method of claim 12, wherein mapping the conversion fraction to nucleotide accessibility status comprises comparing the conversion fraction at a C nucleotide position to an information database of conversion fractions of C nucleotides in different accessibility states, under the same low-yield bisulfite conversion reaction conditions.

22-25. (canceled)

26. A method of determining a nucleotide accessibility status of cytosine (C) nucleotides in a target nucleic acid molecule, the method comprising:
(a) performing a low-yield bisulfite conversion reaction to convert a fraction of cytosine nucleotides in a first sample of a population of the target nucleic acid molecules to uracil (U) nucleotides for a defined amount of time t₁;
(b) constructing a next-generation sequencing (NGS) library based on the converted nucleic acid molecules and running NGS;
(c) analyzing the NGS reads to determine, for each nucleotide position originally known to be a cytosine, the fraction of all molecules of the converted nucleic acid molecules that is converted to determine a bisulfite conversion rate;
(d) repeating steps (a) through (c) for a second sample of the same population of nucleic acid molecules, subject to a low-yield bisulfite conversion reaction for a different amount of time t₂; and
(e) determining the accessibility of a nucleotide in the target nucleic acid molecules based on the combined analysis of the bisulfite conversion rates from both time points.

27-28. (canceled)

29. The method of claim 26, wherein mapping the conversion fraction to nucleotide accessibility status comprises comparing the conversion fraction at a C nucleotide position to conversion fractions of all other C nucleotide positions in the same nucleic acid species.

30. The method of claim 26, wherein mapping the conversion fraction to nucleotide accessibility status comprises comparing the conversion fraction at a C nucleotide position to conversion fractions of all other C nucleotide positions in the other all nucleic acid species within the same multiplexed conversion reaction.

31. The method of claim 26, wherein mapping the conversion fraction to nucleotide accessibility status comprises comparing the conversion fraction at a C nucleotide position to an information database of conversion fractions of C nucleotides in different accessibility states, under the same low-yield bisulfite conversion reaction conditions.

32-35. (canceled)

The application's sequence listing, which the Patent Office published only in electronic form, follows.

SEQUENCE LISTING (1978 sequences)

SEQ ID NO: 1 - DNA, 100 bp, Artificial Sequence
  Synthetic polynucleotide
cgcctggatgccacagccagccgtgagcatagcccgcgctagtcagtcatggtgaccgtcacgtggctgcgcgtggttgccatgtggcctttgggtggct

SEQ ID NO: 2 - DNA, 100 bp, Artificial Sequence
  Synthetic polynucleotide
ggccgagggtggcacgcacagcacacctctccagctagtgtcagaggccaccttcccttttatgacctcctgggctcctttgggactgactggcacctct

SEQ ID NO: 3 - DNA, 33 bp, Artificial Sequence
  Synthetic polynucleotide
acactctttccctacacgacgctcttccgatct

SEQ ID NO: 4 - DNA, 32 bp, Artificial Sequence
  Synthetic polynucleotide
agatcggaagagcacacgtctgaactccagtc

SEQ ID NO: 5 - DNA, 30 bp, Artificial Sequence
  Synthetic polynucleotide
  misc_feature (1)..(30): r is A or G
arrtrtaacraacrtagatcggaagagcgt

SEQ ID NO: 6 - DNA, 30 bp, Artificial Sequence
  Synthetic polynucleotide
  misc_feature (1)..(30): r is A or G
rtrccaccctcrrccagatcggaagagcgt

SEQ ID NO: 7 - DNA, 30 bp, Artificial Sequence
  Synthetic polynucleotide
  misc_feature (1)..(30): r is A or G
gtgctcttccgatctartcrrtracraatt

SEQ ID NO: 8 - DNA, 30 bp, Artificial Sequence
  Synthetic polynucleotide
  misc_feature (1)..(30): r is A or G
gtgctcttccgatctararrtrccartcar

SEQ ID NO: 9 - DNA, 73 bp, Artificial Sequence
  Synthetic polynucleotide
acgttcgttacacctcgcgctcgccagcggccgctcaccacggccgctggcgagcgcgaattcgtcaccgact

SEQ ID NO: 10 - DNA, 150 bp, Artificial Sequence
  Synthetic polynucleotide - Short1-1
ctaatacgactcactatagcaccagtcttattctatccttacattctcaacctaaccaagattctatgagtatactcaatactcatagaatctcctcttaactaccatacctctaatcaactctacacttgaggatacatactggtgagc

SEQ ID NO: 11 - DNA, 150 bp, Artificial Sequence
  Synthetic polynucleotide - Short1-2
ctaatacgactcactatagcaccagtcttattctatccttacattctcaacctaaccattagtattaggaagtactcaacttcctaatactaacctcttaactaccatacctctaatcaactctacacttgaggatacatactggtgagc

SEQ ID NO: 12 - DNA, 150 bp, Artificial Sequence
  Synthetic polynucleotide - Short1-3
ctaatacgactcactatagcaccagtcttattctatccttacattctcaacctaaccataaccttcctatagaactcatctataggaaggttacctcttaactaccatacctctaatcaactctacacttgaggatacatactggtgagc

SEQ ID NO: 13 - DNA, 150 bp, Artificial Sequence
  Synthetic polynucleotide - Short1-4
ctaatacgactcactatagcaccagtcttattctatccttacattctcaacctaaccagactcgtgtatataaactcattatatacacgagtccctcttaactaccatacctctaatcaactctacacttgaggatacatactggtgagc

SEQ ID NO: 14 - DNA, 150 bp, Artificial Sequence
  Synthetic polynucleotide - Short1-5
ctaatacgactcactatagcaccagtcttattctatccttacattctcaacctaaccagcttacttaagtctaactcatagacttaagtaagccctcttaactaccatacctctaatcaactctacacttgaggatacatactggtgagc

SEQ ID NO: 15 - DNA, 150 bp, Artificial Sequence
  Synthetic polynucleotide - Short1-6
ctaatacgactcactatagcaccagtcttattctatccttacattctcaacctaaccactgtctgtgacttatactcaataagtcacagacagcctcttaactaccatacctctaatcaactctacacttgaggatacatactggtgagc

SEQ ID NO: 16 - DNA, 150 bp, Artificial Sequence
  Synthetic polynucleotide - Short1-7
ctaatacgactcactatagcaccagtcttattctatccttacattctcaacctaaccagaacgttagttggtaactcataccaactaacgttccctcttaactaccatacctctaatcaactctacacttgaggatacatactggtgagc

SEQ ID NO: 17 - DNA, 150 bp, Artificial Sequence
  Synthetic polynucleotide - Short1-8
ctaatacgactcactatagcaccagtcttattctatccttacattctcaacctaaccattgagaggtgatcctactcaaggatcacctctcaacctcttaactaccatacctctaatcaactctacacttgaggatacatactggtgagc

SEQ ID NO: 18 - DNA, 150 bp, Artificial Sequence
  Synthetic polynucleotide - Short1-9
ctaatacgactcactatagcaccagtcttattctatccttacattctcaacctaaccagattggcggcaagaaactcattcttgccgccaatccctcttaactaccatacctctaatcaactctacacttgaggatacatactggtgagc

SEQ ID NO: 19 - DNA, 150 bp, Artificial Sequence
  Synthetic polynucleotide - Short1-10
ctaatacgactcactatagcaccagtcttattctatccttacattctcaacctaaccaatactggctcagagcactcagctctgagccagtatcctcttaactaccatacctctaatcaactctacacttgaggatacatactggtgagc

SEQ ID NO: 20 - DNA, 150 bp, Artificial Sequence
  Synthetic polynucleotide - Short1-11
ctaatacgactcactatagcaccagtcttattctatccttacattctcaacctaaccaatcatgtgccggtgtactcaacaccggcacatgatcctcttaactaccatacctctaatcaactctacacttgaggatacatactggtgagc

SEQ ID NO: 21 - DNA, 150 bp, Artificial Sequence
  Synthetic polynucleotide - Short1-12
ctaatacgactcactatagcaccagtcttattctatccttacattctcaacctaaccaggtcgctatgtcaacactcagttgacatagcgacccctcttaactaccatacctctaatcaactctacacttgaggatacatactggtgagc

SEQ ID NO: 22 - DNA, 150 bp, Artificial Sequence
  Synthetic polynucleotide - Short1-13
ctaatacgactcactatagcaccagtcttattctatccttacattctcaacctaaccacgcattggccaagacactcagtcttggccaatgcgcctcttaactaccatacctctaatcaactctacacttgaggatacatactggtgagc

SEQ ID NO: 23 - DNA, 150 bp, Artificial Sequence
  Synthetic polynucleotide - Short1-14
ctaatacgactcactatagcaccagtcttattctatccttacattctcaacctaaccatcctgcgagccgctaactcatagcggctcgcaggacctcttaactaccatacctctaatcaactctacacttgaggatacatactggtgagc

SEQ ID NO: 24 - DNA, 150 bp, Artificial Sequence
  Synthetic polynucleotide - Short1-15
ctaatacgactcactatagcaccagtcttattctatccttacattctcaacctaaccattgatggcgaggtggactcaccacctcgccatcaacctcttaactaccatacctctaatcaactctacacttgaggatacatactggtgagc

SEQ ID NO: 25 - DNA, 150 bp, Artificial Sequence
  Synthetic polynucleotide - Short1-16
ctaatacgactcactatagcaccagtcttattctatccttacattctcaacctaaccacctcggcattgcgctactcaagcgcaatgccgaggcctcttaactaccatacctctaatcaactctacacttgaggatacatactggtgagc

SEQ ID NO: 26 - DNA, 150 bp, Artificial Sequence
  Synthetic polynucleotide - Short1-17
ctaatacgactcactatagcaccagtcttattctatccttacattctcaacctaaccatggcgtcctgcggtcactcagaccgcaggacgccacctcttaactaccatacctctaatcaactctacacttgaggatacatactggtgagc

SEQ ID NO: 27 - DNA, 150 bp, Artificial Sequence
  Synthetic polynucleotide - Short1-18
ctaatacgactcactatagcaccagtcttattctatccttacattctcaacctaaccaggcactccgccgtacactcagtacggcggagtgcccctcttaactaccatacctctaatcaactctacacttgaggatacatactggtgagc

SEQ ID NO: 28 - DNA, 150 bp, Artificial Sequence
  Synthetic polynucleotide - Short1-19
ctaatacgactcactatagcaccagtcttattctatccttacattctcaacctaaccagtcgcggcggccaggactcacctggccgccgcgaccctcttaactaccatacctctaatcaactctacacttgaggatacatactggtgagc

SEQ ID NO: 29 - DNA, 150 bp, Artificial Sequence
  Synthetic polynucleotide - Short1-20
ctaatacgactcactatagcaccagtcttattctatccttacattctcaacctaaccaggccgtgaggtggccactcaggccacctcacggcccctcttaactaccatacctctaatcaactctacacttgaggatacatactggtgagc

SEQ ID NO: 30 - DNA, 150 bp, Artificial Sequence
  Synthetic polynucleotide - Short1-21
ctaatacgactcactatagcaccagtatcattctaactactacctccatcaccttaatagattctatgagtatcactcatactcatagaatctttactctacctattaatccatctacactacatcacttgaggatacatactggtgagc

SEQ ID NO: 31 - DNA, 150 bp, Artificial Sequence
  Synthetic polynucleotide - Short1-22
ctaatacgactcactatagcaccagtatcattctaactactacctccatcaccttaatttagtattaggaagtcactcacttcctaatactaattactctacctattaatccatctacactacatcacttgaggatacatactggtgagc

SEQ ID NO: 32 - DNA, 150 bp, Artificial Sequence
  Synthetic polynucleotide - Short1-23
ctaatacgactcactatagcaccagtatcattctaactactacctccatcaccttaattaaccttcctatagacactctctataggaaggttattactctacctattaatccatctacactacatcacttgaggatacatactggtgagc

SEQ ID NO: 33 - DNA, 150 bp, Artificial Sequence
  Synthetic polynucleotide - Short1-24
ctaatacgactcactatagcaccagtatcattctaactactacctccatcaccttaatgactcgtgtatataacactcttatatacacgagtcttactctacctattaatccatctacactacatcacttgaggatacatactggtgagc

SEQ ID NO: 34 - DNA, 150 bp, Artificial Sequence
  Synthetic polynucleotide - Short1-25
ctaatacgactcactatagcaccagtatcattctaactactacctccatcaccttaatgcttacttaagtctacactctagacttaagtaagcttactctacctattaatccatctacactacatcacttgaggatacatactggtgagc

SEQ ID NO: 35 - DNA, 150 bp, Artificial Sequence
  Synthetic polynucleotide - Short1-26
ctaatacgactcactatagcaccagtatcattctaactactacctccatcaccttaatctgtctgtgacttatcactcataagtcacagacagttactctacctattaatccatctacactacatcacttgaggatacatactggtgagc

SEQ ID NO: 36 - DNA, 150 bp, Artificial Sequence
  Synthetic polynucleotide - Short1-27
ctaatacgactcactatagcaccagtatcattctaactactacctccatcaccttaatgaacgttagttggtacactctaccaactaacgttcttactctacctattaatccatctacactacatcacttgaggatacatactggtgagc

SEQ ID NO: 37 - DNA, 150 bp, Artificial Sequence
  Synthetic polynucleotide - Short1-28
ctaatacgactcactatagcaccagtatcattctaactactacctccatcaccttaatttgagaggtgatcctcactcaggatcacctctcaattactctacctattaatccatctacactacatcacttgaggatacatactggtgagc

SEQ ID NO: 38 - DNA, 150 bp, Artificial Sequence
  Synthetic polynucleotide - Short1-29
ctaatacgactcactatagcaccagtatcattctaactactacctccatcaccttaatgattggcggcaagaacactcttcttgccgccaatcttactctacctattaatccatctacactacatcacttgaggatacatactggtgagc

SEQ ID NO: 39 - DNA, 150 bp, Artificial Sequence
  Synthetic polynucleotide
ctaatacgactcactatagcaccagtatcattctaactactacctccatcaccttaatatactggctcagagccactcgctctgagccagtatttactctacctattaatccatctacactacatcacttgaggatacatactggtgagc

SEQ ID NO: 40 - DNA, 150 bp, Artificial Sequence
  Synthetic polynucleotide
ctaatacgactcactatagcaccagtatcattctaactactacctccatcaccttaatatcatgtgccggtgtcactcacaccggcacatgatttactctacctattaatccatctacactacatcacttgaggatacatactggtgagc

SEQ ID NO: 41 - DNA, 150 bp, Artificial Sequence
  Synthetic polynucleotide
ctaatacgactcactatagcaccagtatcattctaactactacctccatcaccttaatggtcgctatgtcaaccactcgttgacatagcgaccttactctacctattaatccatctacactacatcacttgaggatacatactggtgagc

SEQ ID NO: 42 - DNA, 150 bp, Artificial Sequence
  Synthetic polynucleotide
ctaatacgactcactatagcaccagtatcattctaactactacctccatcaccttaatcgcattggccaagaccactcgtcttggccaatgcgttactctacctattaatccatctacactacatcacttgaggatacatactggtgagc

SEQ ID NO: 43 - DNA, 150 bp, Artificial Sequence
  Synthetic polynucleotide
ctaatacgactcactatagcaccagtatcattctaactactacctccatcaccttaattcctgcgagccgctacactctagcggctcgcaggattactctacctattaatccatctacactacatcacttgaggatacatactggtgagc

SEQ ID NO: 44 - DNA, 150 bp, Artificial Sequence
  Synthetic polynucleotide
ctaatacgactcactatagcaccagtatcattctaactactacctccatcaccttaatttgatggcgaggtggcactcccacctcgccatcaattactctacctattaatccatctacactacatcacttgaggatacatactggtgagc

SEQ ID NO: 45 - DNA, 150 bp, Artificial Sequence
  Synthetic polynucleotide
ctaatacgactcactatagcaccagtatcattctaactactacctccatcaccttaatcctcggcattgcgctcactcagcgcaatgccgaggttactctacctattaatccatctacactacatcacttgaggatacatactggtgagc

SEQ ID NO: 46 - DNA, 150 bp, Artificial Sequence
  Synthetic polynucleotide
ctaatacgactcactatagcaccagtatcattctaactactacctccatcaccttaattggcgtcctgcggtccactcgaccgcaggacgccattactctacctattaatccatctacactacatcacttgaggatacatactggtgagc

SEQ ID NO: 47 - DNA, 150 bp, Artificial Sequence
  Synthetic polynucleotide
ctaatacgactcactatagcaccagtatcattctaactactacctccatcaccttaatggcactccgccgtaccactcgtacggcggagtgccttactctacctattaatccatctacactacatcacttgaggatacatactggtgagc

SEQ ID NO: 48 - DNA, 150 bp, Artificial Sequence
  Synthetic polynucleotide
ctaatacgactcactatagcaccagtatcattctaactactacctccatcaccttaatgtcgcggcggccaggcactccctggccgccgcgacttactctacctattaatccatctacactacatcacttgaggatacatactggtgagc

SEQ ID NO: 49 - DNA, 150 bp, Artificial Sequence
  Synthetic polynucleotide
ctaatacgactcactatagcaccagtatcattctaactactacctccatcaccttaatggccgtgaggtggcccactcggccacctcacggccttactctacctattaatccatctacactacatcacttgaggatacatactggtgagc

SEQ ID NO: 50 - DNA, 150 bp, Artificial Sequence
  Synthetic polynucleotide
ctaatacgactcactatagcaccagtcttataacacactctctaatactctacctccaagattctatgagtattcgacatactcatagaatctataataatccaacttccaactcttctatccacaacttgaggatacatactggtgagc

SEQ ID NO: 51 - DNA, 150 bp, Artificial Sequence
  Synthetic polynucleotide
ctaatacgactcactatagcaccagtcttataacacactctctaatactctacctccattagtattaggaagttcgacacttcctaatactaaataataatccaacttccaactcttctatccacaacttgaggatacatactggtgagc

SEQ ID NO: 52 - DNA, 150 bp, Artificial Sequence
  Synthetic polynucleotide
ctaatacgactcactatagcaccagtcttataacacactctctaatactctacctccataaccttcctatagatcgactctataggaaggttaataataatccaacttccaactcttctatccacaacttgaggatacatactggtgagc

SEQ ID NO: 53 - DNA, 150 bp, Artificial Sequence
  Synthetic polynucleotide
ctaatacgactcactatagcaccagtcttataacacactctctaatactctacctccagactcgtgtatataatcgacttatatacacgagtcataataatccaacttccaactcttctatccacaacttgaggatacatactggtgagc

SEQ ID NO: 54 - DNA, 150 bp, Artificial Sequence
  Synthetic polynucleotide
ctaatacgactcactatagcaccagtcttataacacactctctaatactctacctccagcttacttaagtctatcgactagacttaagtaagcataataatccaacttccaactcttctatccacaacttgaggatacatactggtgagc

SEQ ID NO: 55 - DNA, 150 bp, Artificial Sequence
  Synthetic polynucleotide
ctaatacgactcactatagcaccagtcttataacacactctctaatactctacctccactgtctgtgacttattcgacataagtcacagacagataataatccaacttccaactcttctatccacaacttgaggatacatactggtgagc

SEQ ID NO: 56 - DNA, 150 bp, Artificial Sequence
  Synthetic polynucleotide
ctaatacgactcactatagcaccagtcttataacacactctctaatactctacctccagaacgttagttggtatcgactaccaactaacgttcataataatccaacttccaactcttctatccacaacttgaggatacatactggtgagc

SEQ ID NO: 57 - DNA, 150 bp, Artificial Sequence
  Synthetic polynucleotide
ctaatacgactcactatagcaccagtcttataacacactctctaatactctacctccattgagaggtgatccttcgacaggatcacctctcaaataataatccaacttccaactcttctatccacaacttgaggatacatactggtgagc

SEQ ID NO: 58 - DNA, 150 bp, Artificial Sequence
  Synthetic polynucleotide
ctaatacgactcactatagcaccagtcttataacacactctctaatactctacctccagattggcggcaagaatcgacttcttgccgccaatcataataatccaacttccaactcttctatccacaacttgaggatacatactggtgagc

SEQ ID NO: 59 - DNA, 150 bp, Artificial Sequence
  Synthetic polynucleotide
ctaatacgactcactatagcaccagtcttataacacactctctaatactctacctccaatactggctcagagctcgacgctctgagccagtatataataatccaacttccaactcttctatccacaacttgaggatacatactggtgagc

SEQ ID NO: 60 - DNA, 150 bp, Artificial Sequence
  Synthetic polynucleotide
ctaatacgactcactatagcaccagtcttataacacactctctaatactctacctccaatcatgtgccggtgttcgacacaccggcacatgatataataatccaacttccaactcttctatccacaacttgaggatacatactggtgagc

SEQ ID NO: 61 - DNA, 150 bp, Artificial Sequence
  Synthetic polynucleotide
ctaatacgactcactatagcaccagtcttataacacactctctaatactctacctccaggtcgctatgtcaactcgacgttgacatagcgaccataataatccaacttccaactcttctatccacaacttgaggatacatactggtgagc

SEQ ID NO: 62 - DNA, 150 bp, Artificial Sequence
  Synthetic polynucleotide
ctaatacgactcactatagcaccagtcttataacacactctctaatactctacctccacgcattggccaagactcgacgtcttggccaatgcgataataatccaacttccaactcttctatccacaacttgaggatacatactggtgagc

SEQ ID NO: 63 - DNA, 150 bp, Artificial Sequence
  Synthetic polynucleotide
ctaatacgactcactatagcaccagtcttataacacactctctaatactctacctccatcctgcgagccgctatcgactagcggctcgcaggaataataatccaacttccaactcttctatccacaacttgaggatacatactggtgagc

SEQ ID NO: 64 - DNA, 150 bp, Artificial Sequence
  Synthetic polynucleotide
ctaatacgactcactatagcaccagtcttataacacactctctaatactctacctccattgatggcgaggtggtcgacccacctcgccatcaaataataatccaacttccaactcttctatccacaacttgaggatacatactggtgagc

SEQ ID NO: 65 - DNA, 150 bp, Artificial Sequence
  Synthetic polynucleotide
ctaatacgactcactatagcaccagtcttataacacactctctaatactctacctccacctcggcattgcgcttcgacagcgcaatgccgaggataataatccaacttccaactcttctatccacaacttgaggatacatactggtgagc

SEQ ID NO: 66 - DNA, 150 bp, Artificial Sequence
  Synthetic polynucleotide
ctaatacgactcactatagcaccagtcttataacacactctctaatactctacctccatggcgtcctgcggtctcgacgaccgcaggacgccaataataatccaacttccaactcttctatccacaacttgaggatacatactggtgagc

SEQ ID NO: 67 - DNA, 150 bp, Artificial Sequence
  Synthetic polynucleotide
ctaatacgactcactatagcaccagtcttataacacactctctaatactctacctccaggcactccgccgtactcgacgtacggcggagtgccataataatccaacttccaactcttctatccacaacttgaggatacatactggtgagc

SEQ ID NO: 68 - DNA, 150 bp, Artificial Sequence
  Synthetic polynucleotide
ctaatacgactcactatagcaccagtcttataacacactctctaatactctacctccagtcgcggcggccaggtcgaccctggccgccgcgacataataatccaacttccaactcttctatccacaacttgaggatacatactggtgagc

SEQ ID NO: 69 - DNA, 150 bp, Artificial Sequence
  Synthetic polynucleotide
ctaatacgactcactatagcaccagtcttataacacactctctaatactctacctccaggccgtgaggtggcctcgacggccacctcacggccataataatccaacttccaactcttctatccacaacttgaggatacatactggtgagc

SEQ ID NO: 70 - DNA, 150 bp, Artificial Sequence
  Synthetic polynucleotide
ctaatacgactcactatagcaccagtatcacatactctaacacaacataacattcaccatatgattgagcttgtcactcaagctcaatcatatcacacctcattatacttatactacttcactactacttgaggatacatactggtgagc

SEQ ID NO: 71 - DNA, 150 bp, Artificial Sequence
  Synthetic polynucleotide
ctaatacgactcactatagcaccagtactaatcaccactcaatcacatattactcaccatatgattgagcttgtcactcaagctcaaatcatattccttaccttccttcacaatcataccactataacttgaggatacatactggtgagc

SEQ ID NO: 72 - DNA, 150 bp, Artificial Sequence
  Synthetic polynucleotide
ctaatacgactcactatagcaccagtattctattaattccaacacaccaaccatcctcatatgattgagcttgtcactcaagctcgaatcatattatatcattcctaacatcacctaccactcaacacttgaggatacatactggtgagc

SEQ ID NO: 73 - DNA, 150 bp, Artificial Sequence
  Synthetic polynucleotide
ctaatacgactcactatagcaccagtactaattcattcctacttcacttcctccacatatatgattgagcttgtcactcaagctccaatcatatcatactccacatacttctcctcctaattaccaacttgaggatacatactggtgagc

SEQ ID NO: 74 - DNA, 150 bp, Artificial Sequence
  Synthetic polynucleotide
ctaatacgactcactatagcaccagtttaatcctaccatcctccttaaccattaaccaatatgattgagcttgtcactcaagctcagaaatcatattaataacatcctcacctccttccaactacaacttgaggatacatactggtgagc

SEQ ID NO: 75 - DNA, 150 bp, Artificial Sequence
  Synthetic polynucleotide
ctaatacgactcactatagcaccagtaatccaatataattatactcaccactcacctcatatgattgagcttgtcactcaagctcgcgaatcatattaattaccaaccacaacatccataccatccacttgaggatacatactggtgagc

SEQ ID NO: 76 - DNA, 150 bp, Artificial Sequence
  Synthetic polynucleotide
ctaatacgactcactatagcaccagttatacacttcacatacattccaactcaccatcatatgattgagcttgtcactcaagctcctcaatcatataacaattcattctccaaccatcacatcaacacttgaggatacatactggtgagc

SEQ ID NO: 77 - DNA, 150 bp, Artificial Sequence
  Synthetic polynucleotide
ctaatacgactcactatagcaccagttatactcaatcctccatacaacctcatcatcaatatgattgagcttgtcactcaagctctatcatatacctcacacattctacaacatatattccttctaacttgaggatacatactggtgagc

SEQ ID NO: 78 - DNA, 150 bp, Artificial Sequence
  Synthetic polynucleotide
ctaatacgactcactatagcaccagtcatcaatctcaacacttacatcattcatctacatatgattgagcttgtcactcaagctctatcatatcttcataatacacttcaactcattcaatactctacttgaggatacatactggtgagc

SEQ ID NO: 79 - DNA, 150 bp, Artificial Sequence
  Synthetic polynucleotide
ctaatacgactcactatagcaccagtatatcatcaattattcatcctctcttatcaccatatgattgagcttgtcactcaagctctatcatatacatcactaacctccttcaacaatcctcttcaaacttgaggatacatactggtgagc

SEQ ID NO: 80 - DNA, 150 bp, Artificial Sequence
  Synthetic polynucleotide
ctaatacgactcactatagcaccagtatctaacaatccactctaacctccatacaatcatatgattgagcttgtcactcaagctgtttcatatattcttaccatcctaaccacaattcctatcttcacttgaggatacatactggtgagc

SEQ ID NO: 81 - DNA, 150 bp, Artificial Sequence
  Synthetic polynucleotide
ctaatacgactcactatagcaccagtaattcacatataccacctcacacaatccatctatatgattgagcttgtcactcaagctgtttcatatcttattaattctattcctcaaccaccaatactcacttgaggatacatactggtgagc

SEQ ID NO: 82 - DNA, 150 bp, Artificial Sequence
  Synthetic polynucleotide
ctaatacgactcactatagcaccagttaactacactcaataactactaactatccacaatatgattgagcttgtcactcaagctgtttcatattcatacctacctccacttattaatccaatcaccacttgaggatacatactggtgagc

SEQ ID NO: 83 - DNA, 150 bp, Artificial Sequence
  Synthetic polynucleotide
ctaatacgactcactatagcaccagttatctattcacatctctccaatctcctcatcaatatgattgagcttgtcactcaagctgttcatattataccaccataatccatactcctccattaatatacttgaggatacatactggtgagc

SEQ ID NO: 84 - DNA, 150 bp, Artificial Sequence
  Synthetic polynucleotide
ctaatacgactcactatagcaccagtcatcaattccttatataccttccaccttccatatatgattgagcttgtcactcaagctgttcatatactatatcacataattccacctataacctcctttacttgaggatacatactggtgagc

SEQ ID NO: 85 - DNA, 150 bp, Artificial Sequence
  Synthetic polynucleotide
ctaatacgactcactatagcaccagttcatctctaacttcaacctccttaccaacaatatatgattgagcttgtcactcaagctgttcatattcttcataactcctccatatcctcataccatcatacttgaggatacatactggtgagc

SEQ ID NO: 86 - DNA, 150 bp, Artificial Sequence
  Synthetic polynucleotide
ctaatacgactcactatagcaccagtatataactaacttattcctctcttcacctacaagacgctaagatgaatcactttcatcttagcgtcttcctaacttaacattccacacataatccatcctacttgaggatacatactggtgagc

SEQ ID NO: 87 - DNA, 150 bp, Artificial Sequence
  Synthetic polynucleotide
ctaatacgactcactatagcaccagtacttctcattaccttccaataatcatactccaagacgctaagatgaatcactttcatctatagcgtctttacttacaattaacctccttctcctcaacatacttgaggatacatactggtgagc

SEQ ID NO: 88 - DNA, 150 bp, Artificial Sequence
  Synthetic polynucleotide
ctaatacgactcactatagcaccagttatattaaccttcacctacttctaacacctaaagacgctaagatgaatcactttcatctgtagcgtcttctaacttaacctacctccaacttcaacactcacttgaggatacatactggtgagc

SEQ ID NO: 89 - DNA, 150 bp, Artificial Sequence
  Synthetic polynucleotide
ctaatacgactcactatagcaccagtataatccatactccataatacctcacctccttagacgctaagatgaatcactttcatctctagcgtcttaataacttataactaccactccatccaataaacttgaggatacatactggtgagc

SEQ ID NO: 90 - DNA, 150 bp, Artificial Sequence
  Synthetic polynucleotide
ctaatacgactcactatagcaccagtttataactaattcacaccactacatcttcaccagacgctaagatgaatcactttcatctagatagcgtctacttaaccaactcaactccttccatctcaaacttgaggatacatactggtgagc

SEQ ID NO: 91 - DNA, 150 bp, Artificial Sequence
  Synthetic polynucleotide
ctaatacgactcactatagcaccagtattcattaacttatccttcacaactcatctctagacgctaagatgaatcactttcatctgcgtagcgtctctcaatcctccaaccacacaacctcataatacttgaggatacatactggtgagc

SEQ ID NO: 92 - DNA, 150 bp, Artificial Sequence
  Synthetic polynucleotide
ctaatacgactcactatagcaccagtacaaccttactatcactaatcctcaacacttcagacgctaagatgaatcactttcatctctctagcgtctactcaattctatacaccacttcaaccaaccacttgaggatacatactggtgagc

SEQ ID NO: 93 - DNA, 150 bp, Artificial Sequence
  Synthetic polynucleotide
ctaatacgactcactatagcaccagttactctccattaactaacaatctaccacaactagacgctaagatgaatcactttcatctaagcgtctcaatatccatcattcttcacaactccactactaacttgaggatacatactggtgagc

SEQ ID NO: 94 - DNA, 150 bp, Artificial Sequence
  Synthetic polynucleotide
ctaatacgactcactatagcaccagtacttataccaccaataattcaccttcctacaaagacgctaagatgaatcactttcatctaagcgtctttatatccaattccttaccacttacctccttccacttgaggatacatactggtgagc

SEQ ID NO: 95 - DNA, 150 bp, Artificial Sequence
  Synthetic polynucleotide
ctaatacgactcactatagcaccagttccatcacctacctaatccaactattattactagacgctaagatgaatcactttcatctaagcgtcttcactatccatactacctccttccaatcaatacacttgaggatacatactggtgagc

SEQ ID NO: 96 - DNA, 150 bp, Artificial Sequence
  Synthetic polynucleotide
ctaatacgactcactatagcaccagtctaatctcctcaaccttcaactcctataatacagacgctaagatgaatcactttcatcaatgcgtcttccttcatcttacctccaacaattcttccactaacttgaggatacatactggtgagc

SEQ ID NO: 97 - DNA, 150 bp, Artificial Sequence
  Synthetic polynucleotide
ctaatacgactcactatagcaccagtatatcaccaattccatcttataccaccttcctagacgctaagatgaatcactttcatcaatgcgtcttcaaccactcaatacaaccttacatcttcacacacttgaggatacatactggtgagc

SEQ ID NO: 98 - DNA, 150 bp, Artificial Sequence
  Synthetic polynucleotide
ctaatacgactcactatagcaccagtatatcacaataacacctcacctctaacacctaagacgctaagatgaatcactttcatcaatgcgtctattaactccttcacaacctcattaccacatcacacttgaggatacatactggtgagc

SEQ ID NO: 99 - DNA, 150 bp, Artificial Sequence
  Synthetic polynucleotide
ctaatacgactcactatagcaccagtaatatcactaccactatctattcctccttcctagacgctaagatgaatcactttcatcatgcgtctctcacaactactaaccattacactactaattcttacttgaggatacatactggtgagc

SEQ ID NO: 100 - DNA, 150 bp, Artificial Sequence
  Synthetic polynucleotide
ctaatacgactcactatagcaccagtttaataccatccattccatccatctcatcttcagacgctaagatgaatcactttcatcatgcgtcttatcaataacctatcttccatccacacctctaatacttgaggatacatactggtgagc

SEQ ID NO: 101 - DNA, 150 bp, Artificial Sequence
  Synthetic polynucleotide
ctaatacgactcactatagcaccagtaattccacctcctaacacctactaataatctcagacgctaagatgaatcactttcatcatgcgtctcactcataattacaccacttacttacctcaccatacttgaggatacatactggtgagc

SEQ ID NO: 102 - DNA, 150 bp, Artificial Sequence
  Synthetic polynucleotide
ctaatacgactcactatagcaccagtcaccaacaacctaacttacattaccttaataatgagagtaggtgcgatcacttcgcacctactctcacactcttctaccattaatatcctctcttaacctacttgaggatacatactggtgagc

SEQ ID NO: 103 - DNA, 150 bp, Artificial Sequence
  Synthetic polynucleotide
ctaatacgactcactatagcaccagtctaatatctcactctccattacatccttcaactgagagtaggtgcgatcacttcgcaccatactctcactcttatcttactattaaccatccaactcaccacttgaggatacatactggtgagc

SEQ ID NO: 104 - DNA, 150 bp, Artificial Sequence
  Synthetic polynucleotide
ctaatacgactcactatagcaccagtacttaatccaataacaccatccacactacaactgagagtaggtgcgatcacttcgcaccgtactctcattactacttctcctacaacatccaattctcttacttgaggatacatactggtgagc

SEQ ID NO: 105 - DNA, 150 bp, Artificial Sequence
  Synthetic polynucleotide
ctaatacgactcactatagcaccagttcataattcctactcaacttcatctccactactgagagtaggtgcgatcacttcgcaccctactctcaacataacaccactacctactcctcacaatataacttgaggatacatactggtgagc

SEQ ID NO: 106 - DNA, 150 bp, Artificial Sequence
  Synthetic polynucleotide
ctaatacgactcactatagcaccagtatatctaacttccttcatcaactcctcatacctgagagtaggtgcgatcacttcgcaccagatactctcaaaccatactccttataccattacctaccacacttgaggatacatactggtgagc

SEQ ID NO: 107 - DNA, 150 bp, Artificial Sequence
  Synthetic polynucleotide
ctaatacgactcactatagcaccagtacttaatcaacacaccaccaattaccatatcttgagagtaggtgcgatcacttcgcaccgcgtactctcataataacaccaactcatccttaacctcctaacttgaggatacatactggtgagc

SEQ ID NO: 108 - DNA, 150 bp, Artificial Sequence
  Synthetic polynucleotide
ctaatacgactcactatagcaccagtatccataccatactcacaatcacaatatatcctgagagtaggtgcgatcacttcgcaccctctactctcatcttcactactacttctctccaatcctaccacttgaggatacatactggtgagc

SEQ ID NO: 109 - DNA, 150 bp, Artificial Sequence
  Synthetic polynucleotide
ctaatacgactcactatagcaccagttatcttcatctaacctatacttcctccacctatgagagtaggtgcgatcacttcgcaccaactctcatatcctcactattaattaaccttcaaccacaatacttgaggatacatactggtgagc

SEQ ID NO: 110 - DNA, 150 bp, Artificial Sequence
  Synthetic polynucleotide
ctaatacgactcactatagcaccagtcaatataactccacctaactaacttctctccttgagagtaggtgcgatcacttcgcaccaactctcaacttatcttatccaatcaccaccaaccttatccacttgaggatacatactggtgagc

SEQ ID NO: 111 - DNA, 150 bp, Artificial Sequence
  Synthetic polynucleotide
ctaatacgactcactatagcaccagtataccacattctcaataacctacaactccaattgagagtaggtgcgatcacttcgcaccaactctcaacctcactatataccttacttccatattaccttacttgaggatacatactggtgagc

SEQ ID NO: 112 - DNA, 150 bp, Artificial Sequence
  Synthetic polynucleotide
ctaatacgactcactatagcaccagtcaactaccttaaccaacttcttacaatctcaatgagagtaggtgcgatcacttcgcacgatctctcatattaactacttctcctcctatatccatcaaccacttgaggatacatactggtgagc

SEQ ID NO: 113 - DNA, 150 bp, Artificial Sequence
  Synthetic polynucleotide
ctaatacgactcactatagcaccagtacttcctataacttaatcctcctatacactcttgagagtaggtgcgatcacttcgcacgatctctcaccaattaacctccattaacttaccttacaccacacttgaggatacatactggtgagc

SEQ ID NO: 114 - DNA, 150 bp, Artificial Sequence
  Synthetic polynucleotide
ctaatacgactcactatagcaccagtatcttaatacttccaattccttacctcactcatgagagtaggtgcgatcacttcgcacgatctctcaactaacctcctatacttacatcaactccataacacttgaggatacatactggtgagc

SEQ ID NO: 115 - DNA, 150 bp, Artificial Sequence
  Synthetic polynucleotide
ctaatacgactcactatagcaccagtaatcatccaacttcctatataataccacaatctgagagtaggtgcgatcacttcgcacgtctctcatcattacaccttcctctccaattatcataactttacttgaggatacatactggtgagc

SEQ ID NO: 116 - DNA, 150 bp, Artificial Sequence
  Synthetic polynucleotide
ctaatacgactcactatagcaccagtccatcatcctccataatcacacatcattaacttgagagtaggtgcgatcacttcgcacgtctctcatcatctccaaccaccaacaacttaactaacacatacttgaggatacatactggtgagc

SEQ ID NO: 117 - DNA, 150 bp, Artificial Sequence
  Synthetic polynucleotide
ctaatacgactcactatagcaccagtctccttattaaccattccaccttacatccatatgagagtaggtgcgatcacttcgcacgtctctcatctataatcttcctccttattccatcactatcctacttgaggatacatactggtgagc

SEQ ID NO: 118 - DNA, 150 bp, Artificial Sequence
  Synthetic polynucleotide
ctaatacgactcactatagcaccagtccacttaccttcaacataccataaccttataacggacgttggtggtctcactgaccaccaacgtccgactaattccaacctaatatcctccttaccttcaacttgaggatacatactggtgagc

SEQ ID NO: 119 - DNA, 150 bp, Artificial Sequence
  Synthetic polynucleotide
ctaatacgactcactatagcaccagttctaatctaatctcacaccaccttactcacaacggacgttggtggtctcactgaccaccaaacgtccgctcaatctaaccatactcttcctcaaccaataacttgaggatacatactggtgagc

SEQ ID NO: 120 - DNA, 150 bp, Artificial Sequence
  Synthetic polynucleotide
ctaatacgactcactatagcaccagtataattacctaacctccataaccattcctcaacggacgttggtggtctcactgaccaccgaacgtccgtatacaaccattcataaccttcacctcttacaacttgaggatacatactggtgagc

SEQ ID NO: 121 - DNA, 150 bp, Artificial Sequence
  Synthetic polynucleotide
ctaatacgactcactatagcaccagtaataacctcttcacacaacattaccactataccggacgttggtggtctcactgaccacccaacgtccgatcctaacatcttcatcctataatccatactcacttgaggatacatactggtgagc

SEQ ID NO: 122 - DNA, 150 bp, Artificial Sequence
  Synthetic polynucleotide
ctaatacgactcactatagcaccagtcctatattatccaacaccatcatcctccttaacggacgttggtggtctcactgaccaccagaaacgtccgactcttaacttatcctccttaatccaacatacttgaggatacatactggtgagc

SEQ ID NO: 123 - DNA, 150 bp, Artificial Sequence
  Synthetic polynucleotide
ctaatacgactcactatagcaccagttaatcaaccttaattaccatcaccaatccaaccggacgttggtggtctcactgaccaccgcgaacgtccgctattaccactacacatctcactccttattacttgaggatacatactggtgagc

SEQ ID NO: 124 - DNA, 150 bp, Artificial Sequence
  Synthetic polynucleotide
ctaatacgactcactatagcaccagtattacacattaatattctccaaccaacctacccggacgttggtggtctcactgaccaccctcaacgtccgccatatcaccttcatatacaataccacattacttgaggatacatactggtgagc

SEQ ID NO: 125 - DNA, 150 bp, Artificial Sequence
  Synthetic polynucleotide
ctaatacgactcactatagcaccagtatactccaatccaaccaccaataaccattcaacggacgttggtggtctcactgaccacctacgtccgtacattccttcacttccaactacttaattccttacttgaggatacatactggtgagc

SEQ ID NO: 126 - DNA, 150 bp, Artificial Sequence
  Synthetic polynucleotide
ctaatacgactcactatagcaccagttatcaccttctcttccaatccattacttcttccggacgttggtggtctcactgaccacctacgtccgaatactcacctctctaattcaccttcaccatcaacttgaggatacatactggtgagc

SEQ ID NO: 127 - DNA, 150 bp, Artificial Sequence
  Synthetic polynucleotide
ctaatacgactcactatagcaccagtaatacacctacttaccaattcttccaccattacggacgttggtggtctcactgaccacctacgtccgctacacctaacttctatcatataccatctaattacttgaggatacatactggtgagc

SEQ ID NO: 128 - DNA, 150 bp, Artificial Sequence
  Synthetic polynucleotide
ctaatacgactcactatagcaccagttatccatactaaccataccttctattccactccggacgttggtggtctcactgaccacgttcgtccgttaacttaaccaactacttcataccactctcacacttgaggatacatactggtgagc

SEQ ID NO: 129 - DNA, 150 bp, Artificial Sequence
  Synthetic polynucleotide
ctaatacgactcactatagcaccagtttccaatcacacattcctacaacctacctatacggacgttggtggtctcactgaccacgttcgtccgttacaattcttccaatccatactaccttcctctacttgaggatacatactggtgagc

SEQ ID NO: 130 - DNA, 150 bp, Artificial Sequence
  Synthetic polynucleotide
ctaatacgactcactatagcaccagtatctactccttctaaccttctaacatacattccggacgttggtggtctcactgaccacgttcgtccgtaacattaacttccatcctctactctctatcctacttgaggatacatactggtgagc

SEQ ID NO: 131 - DNA, 150 bp, Artificial Sequence
  Synthetic polynucleotide
ctaatacgactcactatagcaccagttacttcctcaactccattatctctaataacctcggacgttggtggtctcactgaccacgtcgtccgactatcaattcacctccattcaacactaacacctacttgaggatacatactggtgagc

SEQ ID NO: 132 - DNA, 150 bp, Artificial Sequence
  Synthetic polynucleotide
ctaatacgactcactatagcaccagtaatcttcctaacattcactaacctcaccactacggacgttggtggtctcactgaccacgtcgtccgtcttattacctcatcatcctaacttcctaactctacttgaggatacatactggtgagc

SEQ ID NO: 133 - DNA, 150 bp, Artificial Sequence
  Synthetic polynucleotide
ctaatacgactcactatagcaccagttaataccttccacctattactccatatatccacggacgttggtggtctcactgaccacgtcgtccgcctaattcaacttccaaccacactccattaacttacttgaggatacatactggtgagc

SEQ ID NO: 134 - DNA, 150 bp, Artificial Sequence
  Synthetic polynucleotide
ctaatacgactcactatagcaccagtatctactaccacttattcctctctactccttacgaggcggccttacgtcactcgtaaggccgcctcgaatcatcaactccacatcaccactacaacaattacttgaggatacatactggtgagc

SEQ ID NO: 135 - DNA, 150 bp, Artificial Sequence
  Synthetic polynucleotide
ctaatacgactcactatagcaccagtacatacaccattacctcattcacctcaatctacgaggcggccttacgtcactcgtaaggaccgcctcgcacataccattaaccattaactatacttccttacttgaggatacatactggtgagc

SEQ ID NO: 136 - DNA, 150 bp, Artificial Sequence
  Synthetic polynucleotide
ctaatacgactcactatagcaccagtcttacatattacacttaacctccacattacctcgaggcggccttacgtcactcgtaagggccgcctcgaatcataacacctcatcctaacttcctaactcacttgaggatacatactggtgagc

SEQ ID NO: 137 - DNA, 150 bp, Artificial Sequence
  Synthetic polynucleotide
ctaatacgactcactatagcaccagttattcaacactccactaatcaactaccaactccgaggcggccttacgtcactcgtaaggcccgcctcgcttactccacaccatcctattacatcacaacaacttgaggatacatactggtgagc

SEQ ID NO: 138 - DNA, 150 bp, Artificial Sequence
  Synthetic polynucleotide
ctaatacgactcactatagcaccagtaacattcttcacacttaatccaccatatcaaccgaggcggccttacgtcactcgtaaggagaccgcctcgtatatctataccttccatctcttaccaacaacttgaggatacatactggtgagc

SEQ ID NO: 139 - DNA, 150 bp, Artificial Sequence
  Synthetic polynucleotide
ctaatacgactcactatagcaccagttaacacataacttccaccataatcaacttatccgaggcggccttacgtcactcgtaagggcgccgcctcgacacttcctattacctccttcataatccatacttgaggatacatactggtgagc

SEQ ID NO: 140 - DNA, 150 bp, Artificial Sequence
  Synthetic polynucleotide
ctaatacgactcactatagcaccagttaattccatatccttctccacctcattacaaccgaggcggccttacgtcactcgtaaggctcccgcctcgtaacttcctaacatctatacatccaccaacacttgaggatacatactggtgagc

SEQ ID NO: 141 - DNA, 150 bp, Artificial Sequence
  Synthetic polynucleotide
ctaatacgactcactatagcaccagtttcaacttctacttccttcaccaccaattaaccgaggcggccttacgtcactcgtaagggcgcctcgtaccataacattccacaatcaataccatcacatacttgaggatacatactggtgagc

SEQ ID NO: 142 - DNA, 150 bp, Artificial Sequence
  Synthetic polynucleotide
ctaatacgactcactatagcaccagttccattcataactacctaacacctcacacaatcgaggcggccttacgtcactcgtaagggcgcctcgataactccataataaccttccaccaatcaaccaacttgaggatacatactggtgagc

SEQ ID NO: 143 - DNA, 150 bp, Artificial Sequence
  Synthetic polynucleotide
ctaatacgactcactatagcaccagtttaaccacaattatccattaatccacctccatcgaggcggccttacgtcactcgtaagggcgcctcgcaatacctaccttcttaactacaccttaatcttacttgaggatacatactggtgagc

SEQ ID NO: 144 - DNA, 150 bp, Artificial Sequence
  Synthetic polynucleotide
ctaatacgactcactatagcaccagtttcaataaccaacatacctctaattcaacaaccgaggcggccttacgtcactcgtaagcgggcctcgtccattccaactccataacaattctcctacaatacttgaggatacatactggtgagc

SEQ ID NO: 145 - DNA, 150 bp, Artificial Sequence
  Synthetic polynucleotide
ctaatacgactcactatagcaccagtctattctactccacaccatcaatactctataccgaggcggccttacgtcactcgtaagcgggcctcgataccttcaccaccaatattcttaactcctcctacttgaggatacatactggtgagc

SEQ ID NO: 146 - DNA, 150 bp, Artificial Sequence
  Synthetic polynucleotide
ctaatacgactcactatagcaccagtaatactccttactatatccattccttaccttccgaggcggccttacgtcactcgtaagcgggcctcgatataacacctcacctacaacatacctctccttacttgaggatacatactggtgagc

SEQ ID NO: 147 - DNA, 150 bp, Artificial Sequence
  Synthetic polynucleotide
ctaatacgactcactatagcaccagtttcaacaattattccaacatcaccataccatacgaggcggccttacgtcactcgtaagcggcctcgaaccaccttaccatcaacctaatcaatacctcatacttgaggatacatactggtgagc

SEQ ID NO: 148 - DNA, 150 bp, Artificial Sequence
  Synthetic polynucleotide
ctaatacgactcactatagcaccagtccataatcctatatcataccaacctccattctcgaggcggccttacgtcactcgtaagcggcctcgaatcacaatatctccattcctccacctcattcatacttgaggatacatactggtgagc

SEQ ID NO: 149 - DNA, 150 bp, Artificial Sequence
  Synthetic polynucleotide
ctaatacgactcactatagcaccagtataataccacaattccttcacctctcttcctacgaggcggccttacgtcactcgtaagcggcctcgaaccttccttctctatataatctctcactaacttacttgaggatacatactggtgagc

SEQ ID NO: 150 - DNA, 150 bp, Artificial Sequence
  Synthetic polynucleotide
ctaatacgactcactatagcaccagtttattaaccatgttcacgccacctaatctgttatgaccaactatcgagtcactcgatagttggtcataacattatagcctgccaacctctccgcttcataacttgaggatacatactggtgagc

SEQ ID NO: 151 - DNA, 150 bp, Artificial Sequence
  Synthetic polynucleotide
ctaatacgactcactatagcaccagtttattaaccatgttcacgccacctaattgttatgaccaactatcgagctcatctcgatagttggtcataacatatagcctgccaacctctccgcttcataacttgaggatacatactggtgagc

SEQ ID NO: 152 - DNA, 150 bp, Artificial Sequence
  Synthetic polynucleotide
ctaatacgactcactatagcaccagtttattaaccatgttcacgccacctatgttatgaccaactatcgagatctcattatctcgatagttggtcataacaagcctgccaacctctccgcttcataacttgaggatacatactggtgagc

SEQ ID NO: 153 - DNA, 150 bp, Artificial Sequence
  Synthetic polynucleotide
ctaatacgactcactatagcaccagtttattaaccatgttcacgccactgttatgaccaactatcgagctaatctcattatagctcgatagttggtcataacacctgccaacctctccgcttcataacttgaggatacatactggtgagc

SEQ ID NO: 154 - DNA, 150 bp, Artificial Sequence
  Synthetic polynucleotide
ctaatacgactcactatagcaccagtttattaaccatgttcacgcctgttatgaccaactatcgagacctaatctcattatagcctctcgatagttggtcataacagccaacctctccgcttcataacttgaggatacatactggtgagc

SEQ ID NO: 155 - DNA, 150 bp, Artificial Sequence
  Synthetic polynucleotide
ctaatacgactcactatagcaccagtttattaaccatgttctgttatgaccaactatcgagacgccacctaatctcattatagcctgccaactcgatagttggtcataacacctctccgcttcataacttgaggatacatactggtgagc

SEQ ID NO: 156 - DNA, 150 bp, Artificial Sequence
  Synthetic polynucleotide
ctaatacgactcactatagcaccagtttattaaccatgttatgaccaactatcgagtgttcacgccacctaatctcattatagcctgccaacctctctcgatagttggtcataacaccgcttcataacttgaggatacatactggtgagc

SEQ ID NO: 157 - DNA, 150 bp, Artificial Sequence
  Synthetic polynucleotide
ctaatacgactcactatagcaccagtttatttgttatgaccaactatcgagaaccatgttcacgccacctaatctcattatagcctgccaacctctccgctctcgatagttggtcataacatcataacttgaggatacatactggtgagc

SEQ ID NO: 158 - DNA, 150 bp, Artificial Sequence
  Synthetic polynucleotide
ctaatacgactcactatagcaccagtttattaaccatgttcacgccacctaatccgaacgactagtagctgctgtcacagcagctactagtcgttcgttatagcctgccaacctctccgcttcataacttgaggatacatactggtgagc

SEQ ID NO: 159 - DNA, 150 bp, Artificial Sequence
  Synthetic polynucleotide
ctaatacgactcactatagcaccagtttattaaccatgttcacgccacctaatcgaacgactagtagctgctgctcatcagcagctactagtcgttcgtatagcctgccaacctctccgcttcataacttgaggatacatactggtgagc

SEQ ID NO: 160 - DNA, 150 bp, Artificial Sequence
  Synthetic polynucleotide
ctaatacgactcactatagcaccagtttattaaccatgttcacgccacctacgaacgactagtagctgctgatctcattatcagcagctactagtcgttcgagcctgccaacctctccgcttcataacttgaggatacatactggtgagc

SEQ ID NO: 161 - DNA, 150 bp, Artificial Sequence
  Synthetic polynucleotide
ctaatacgactcactatagcaccagtttattaaccatgttcacgccaccgaacgactagtagctgctgctaatctcattatagcagcagctactagtcgttcgcctgccaacctctccgcttcataacttgaggatacatactggtgagc

SEQ ID NO: 162 - DNA, 150 bp, Artificial Sequence
  Synthetic polynucleotide
ctaatacgactcactatagcaccagtttattaaccatgttcacgcccgaacgactagtagctgctgacctaatctcattatagcctcagcagctactagtcgttcggccaacctctccgcttcataacttgaggatacatactggtgagc

SEQ ID NO: 163 - DNA, 150 bp, Artificial Sequence
  Synthetic polynucleotide
ctaatacgactcactatagcaccagtttattaaccatgttccgaacgactagtagctgctgacgccacctaatctcattatagcctgccaacagcagctactagtcgttcgcctctccgcttcataacttgaggatacatactggtgagc

SEQ ID NO: 164 - DNA, 150 bp, Artificial Sequence
  Synthetic polynucleotide
ctaatacgactcactatagcaccagtttattaaccacgaacgactagtagctgctgtgttcacgccacctaatctcattatagcctgccaacctctcagcagctactagtcgttcgccgcttcataacttgaggatacatactggtgagc

SEQ ID NO: 165 - DNA, 150 bp, Artificial Sequence
  Synthetic polynucleotide
ctaatacgactcactatagcaccagtttattcgaacgactagtagctgctgaaccatgttcacgccacctaatctcattatagcctgccaacctctccgctcagcagctactagtcgttcgtcataacttgaggatacatactggtgagc

SEQ ID NO: 166 - DNA, 150 bp, Artificial Sequence
  Synthetic polynucleotide
ctaatacgactcactatagcaccagtttattaaccatgttcacgccacctaatctgaattgccagctggcacgctcagcgtgccagctggcaattcattatagcctgccaacctctccgcttcataacttgaggatacatactggtgagc

SEQ ID NO: 167 - DNA, 150 bp, Artificial Sequence
  Synthetic polynucleotide
ctaatacgactcactatagcaccagtttattaaccatgttcacgccacctaattgaattgccagctggcacgcctcatgcgtgccagctggcaattcatatagcctgccaacctctccgcttcataacttgaggatacatactggtgagc

SEQ ID NO: 168 - DNA, 150 bp, Artificial Sequence
  Synthetic polynucleotide
ctaatacgactcactatagcaccagtttattaaccatgttcacgccacctatgaattgccagctggcacgcatctcattatgcgtgccagctggcaattcaagcctgccaacctctccgcttcataacttgaggatacatactggtgagc

SEQ ID NO: 169 - DNA, 150 bp, Artificial Sequence
  Synthetic polynucleotide
ctaatacgactcactatagcaccagtttattaaccatgttcacgccactgaattgccagctggcacgcctaatctcattataggcgtgccagctggcaattcacctgccaacctctccgcttcataacttgaggatacatactggtgagc

SEQ ID NO: 170 - DNA, 150 bp, Artificial Sequence
  Synthetic polynucleotide
ctaatacgactcactatagcaccagtttattaaccatgttcacgcctgaattgccagctggcacgcacctaatctcattatagcctgcgtgccagctggcaattcagccaacctctccgcttcataacttgaggatacatactggtgagc

SEQ ID NO: 171 - DNA, 150 bp, Artificial Sequence
  Synthetic polynucleotide
ctaatacgactcactatagcaccagtttattaaccatgttctgaattgccagctggcacgcacgccacctaatctcattatagcctgccaagcgtgccagctggcaattcacctctccgcttcataacttgaggatacatactggtgagc

SEQ ID NO: 172 - DNA, 150 bp, Artificial Sequence
  Synthetic polynucleotide
ctaatacgactcactatagcaccagtttattaaccatgaattgccagctggcacgctgttcacgccacctaatctcattatagcctgccaacctctgcgtgccagctggcaattcaccgcttcataacttgaggatacatactggtgagc

SEQ ID NO: 173 - DNA, 150 bp, Artificial Sequence
  Synthetic polynucleotide
ctaatacgactcactatagcaccagtttatttgaattgccagctggcacgcaaccatgttcacgccacctaatctcattatagcctgccaacctctccgctgcgtgccagctggcaattcatcataacttgaggatacatactggtgagc

SEQ ID NO: 174 - DNA, 150 bp, Artificial Sequence
  Synthetic polynucleotide
ctaatacgactcactatagcaccagtatatccgtacaccatagccacctccagttgttatgaccaactatcgagcagctcgatagttggtcataacaccatgtcctagagaagccagctaccaaccacttgaggatacatactggtgagc

SEQ ID NO: 175 - DNA, 150 bp, Artificial Sequence
  Synthetic polynucleotide
ctaatacgactcactatagcaccagtatatccgtacaccatagccacctccagtgttatgaccaactatcgagtcagcctcgatagttggtcataacacatgtcctagagaagccagctaccaaccacttgaggatacatactggtgagc

SEQ ID NO: 176 - DNA, 150 bp, Artificial Sequence
  Synthetic polynucleotide
ctaatacgactcactatagcaccagtatatccgtacaccatagccacctcctgttatgaccaactatcgagagtcagccatctcgatagttggtcataacagtcctagagaagccagctaccaaccacttgaggatacatactggtgagc

SEQ ID NO: 177 - DNA, 150 bp, Artificial Sequence
  Synthetic polynucleotide
ctaatacgactcactatagcaccagtatatccgtacaccatagccacctgttatgaccaactatcgagtccagtcagccatgtctcgatagttggtcataacacctagagaagccagctaccaaccacttgaggatacatactggtgagc

SEQ ID NO: 178 - DNA, 150 bp, Artificial Sequence
  Synthetic polynucleotide
ctaatacgactcactatagcaccagtatatccgtacaccatagccatgttatgaccaactatcgagcctccagtcagccatgtcctctcgatagttggtcataacaagagaagccagctaccaaccacttgaggatacatactggtgagc

SEQ ID NO: 179 - DNA, 150 bp, Artificial Sequence
  Synthetic polynucleotide
ctaatacgactcactatagcaccagtatatccgtacaccattgttatgaccaactatcgagagccacctccagtcagccatgtcctagagactcgatagttggtcataacaagccagctaccaaccacttgaggatacatactggtgagc

SEQ ID NO: 180 - DNA, 150 bp, Artificial Sequence
  Synthetic polynucleotide
ctaatacgactcactatagcaccagtatatccgtactgttatgaccaactatcgagaccatagccacctccagtcagccatgtcctagagaagccactcgatagttggtcataacagctaccaaccacttgaggatacatactggtgagc

SEQ ID NO: 181 - DNA, 150 bp, Artificial Sequence
  Synthetic polynucleotide
ctaatacgactcactatagcaccagtatatctgttatgaccaactatcgagcgtacaccatagccacctccagtcagccatgtcctagagaagccagctacctcgatagttggtcataacacaaccacttgaggatacatactggtgagc

SEQ ID NO: 182 - DNA, 150 bp, Artificial Sequence
  Synthetic polynucleotide
ctaatacgactcactatagcaccagtatatccgtacaccatagccacctccagtcgaacgactagtagctgctgcagcagcagctactagtcgttcgccatgtcctagagaagccagctaccaaccacttgaggatacatactggtgagc

SEQ ID NO: 183 - DNA, 150 bp, Artificial Sequence
  Synthetic polynucleotide
ctaatacgactcactatagcaccagtatatccgtacaccatagccacctccagcgaacgactagtagctgctgtcagccagcagctactagtcgttcgcatgtcctagagaagccagctaccaaccacttgaggatacatactggtgagc

SEQ ID NO: 184 - DNA, 150 bp, Artificial Sequence
  Synthetic polynucleotide
ctaatacgactcactatagcaccagtatatccgtacaccatagccacctcccgaacgactagtagctgctgagtcagccatcagcagctactagtcgttcggtcctagagaagccagctaccaaccacttgaggatacatactggtgagc

SEQ ID NO: 185 - DNA, 150 bp, Artificial Sequence
  Synthetic polynucleotide
ctaatacgactcactatagcaccagtatatccgtacaccatagccacccgaacgactagtagctgctgtccagtcagccatgtcagcagctactagtcgttcgcctagagaagccagctaccaaccacttgaggatacatactggtgagc

SEQ ID NO: 186 - DNA, 150 bp, Artificial Sequence
  Synthetic polynucleotide
ctaatacgactcactatagcaccagtatatccgtacaccatagccacgaacgactagtagctgctgcctccagtcagccatgtcctcagcagctactagtcgttcgagagaagccagctaccaaccacttgaggatacatactggtgagc

SEQ ID NO: 187 - DNA, 150 bp, Artificial Sequence
  Synthetic polynucleotide
ctaatacgactcactatagcaccagtatatccgtacaccatcgaacgactagtagctgctgagccacctccagtcagccatgtcctagagacagcagctactagtcgttcgagccagctaccaaccacttgaggatacatactggtgagc

SEQ ID NO: 188 - DNA, 150 bp, Artificial Sequence
  Synthetic polynucleotide
ctaatacgactcactatagcaccagtatatccgtaccgaacgactagtagctgctgaccatagccacctccagtcagccatgtcctagagaagccacagcagctactagtcgttcggctaccaaccacttgaggatacatactggtgagc

SEQ ID NO: 189 - DNA, 150 bp, Artificial Sequence
  Synthetic polynucleotide
ctaatacgactcactatagcaccagtatatccgaacgactagtagctgctgcgtacaccatagccacctccagtcagccatgtcctagagaagccagctaccagcagctactagtcgttcgcaaccacttgaggatacatactggtgagc

SEQ ID NO: 190 - DNA, 150 bp, Artificial Sequence
  Synthetic polynucleotide
ctaatacgactcactatagcaccagtatatccgtacaccatagccacctccagttgaattgccagctggcacgccaggcgtgccagctggcaattcaccatgtcctagagaagccagctaccaaccacttgaggatacatactggtgagc

SEQ ID NO: 191 - DNA, 150 bp, Artificial Sequence
  Synthetic polynucleotide
ctaatacgactcactatagcaccagtatatccgtacaccatagccacctccagtgaattgccagctggcacgctcagcgcgtgccagctggcaattcacatgtcctagagaagccagctaccaaccacttgaggatacatactggtgagc

SEQ ID NO: 192 - DNA, 150 bp, Artificial Sequence
  Synthetic polynucleotide
ctaatacgactcactatagcaccagtatatccgtacaccatagccacctcctgaattgccagctggcacgcagtcagccatgcgtgccagctggcaattcagtcctagagaagccagctaccaaccacttgaggatacatactggtgagc

SEQ ID NO: 193 - DNA, 150 bp, Artificial Sequence
  Synthetic polynucleotide
ctaatacgactcactatagcaccagtatatccgtacaccatagccacctgaattgccagctggcacgctccagtcagccatgtgcgtgccagctggcaattcacctagagaagccagctaccaaccacttgaggatacatactggtgagc

SEQ ID NO: 194 - DNA, 150 bp, Artificial Sequence
  Synthetic polynucleotide
ctaatacgactcactatagcaccagtatatccgtacaccatagccatgaattgccagctggcacgccctccagtcagccatgtcctgcgtgccagctggcaattcaagagaagccagctaccaaccacttgaggatacatactggtgagc

SEQ ID NO: 195 - DNA, 150 bp, Artificial Sequence
  Synthetic polynucleotide
ctaatacgactcactatagcaccagtatatccgtacaccattgaattgccagctggcacgcagccacctccagtcagccatgtcctagagagcgtgccagctggcaattcaagccagctaccaaccacttgaggatacatactggtgagc

SEQ ID NO: 196 - DNA, 150 bp, Artificial Sequence
  Synthetic polynucleotide
ctaatacgactcactatagcaccagtatatccgtactgaattgccagctggcacgcaccatagccacctccagtcagccatgtcctagagaagccagcgtgccagctggcaattcagctaccaaccacttgaggatacatactggtgagc

SEQ ID NO: 197 - DNA, 150 bp, Artificial Sequence
  Synthetic polynucleotide
ctaatacgactcactatagcaccagtatatctgaattgccagctggcacgccgtacaccatagccacctccagtcagccatgtcctagagaagccagctacgcgtgccagctggcaattcacaaccacttgaggatacatactggtgagc

SEQ ID NO: 198 - DNA, 150 bp, Artificial Sequence
  Synthetic polynucleotide
ctaatacgactcactatagcaccagtgtagagccgctcctccactcctcgaccgtgttatgaccaactatcgagctcctcgatagttggtcataacacgccacgcttctgtcacctcttcctaccaacttgaggatacatactggtgagc

SEQ ID NO: 199 - DNA, 150 bp, Artificial Sequence
  Synthetic polynucleotide
ctaatacgactcactatagcaccagtgtagagccgctcctccactcctcgacctgttatgaccaactatcgaggctccctcgatagttggtcataacagccacgcttctgtcacctcttcctaccaacttgaggatacatactggtgagc

SEQ ID NO: 200 - DNA, 150 bp, Artificial Sequence
  Synthetic polynucleotide
ctaatacgactcactatagcaccagtgtagagccgctcctccactcctcgatgttatgaccaactatcgagccgctccgccctcgatagttggtcataacaacgcttctgtcacctcttcctaccaacttgaggatacatactggtgagc

SEQ ID NO: 201 - DNA, 150 bp, Artificial Sequence
  Synthetic polynucleotide
ctaatacgactcactatagcaccagtgtagagccgctcctccactccttgttatgaccaactatcgagcgaccgctccgccacctcgatagttggtcataacagcttctgtcacctcttcctaccaacttgaggatacatactggtgagc

SEQ ID NO: 202 - DNA, 150 bp, Artificial Sequence
  Synthetic polynucleotide
ctaatacgactcactatagcaccagtgtagagccgctcctccactctgttatgaccaactatcgagctcgaccgctccgccacgctctcgatagttggtcataacatctgtcacctcttcctaccaacttgaggatacatactggtgagc

SEQ ID NO: 203 - DNA, 150 bp, Artificial Sequence
  Synthetic polynucleotide
ctaatacgactcactatagcaccagtgtagagccgctcctctgttatgaccaactatcgagcactcctcgaccgctccgccacgcttctgtctcgatagttggtcataacacacctcttcctaccaacttgaggatacatactggtgagc

SEQ ID NO: 204 - DNA, 150 bp, Artificial Sequence
  Synthetic polynucleotide
ctaatacgactcactatagcaccagtgtagagccgctgttatgaccaactatcgagtcctccactcctcgaccgctccgccacgcttctgtcacctctcgatagttggtcataacacttcctaccaacttgaggatacatactggtgagc

SEQ ID NO: 205 - DNA, 150 bp, Artificial Sequence
  Synthetic polynucleotide
ctaatacgactcactatagcaccagtgtagatgttatgaccaactatcgaggccgctcctccactcctcgaccgctccgccacgcttctgtcacctcttccctcgatagttggtcataacataccaacttgaggatacatactggtgagc

SEQ ID NO: 206 - DNA, 150 bp, Artificial Sequence
  Synthetic polynucleotide
ctaatacgactcactatagcaccagtgtagagccgctcctccactcctcgaccgcgaacgactagtagctgctgctccagcagctactagtcgttcgcgccacgcttctgtcacctcttcctaccaacttgaggatacatactggtgagc

SEQ ID NO: 207 - DNA, 150 bp, Artificial Sequence
  Synthetic polynucleotide
ctaatacgactcactatagcaccagtgtagagccgctcctccactcctcgacccgaacgactagtagctgctggctcccagcagctactagtcgttcggccacgcttctgtcacctcttcctaccaacttgaggatacatactggtgagc

SEQ ID NO: 208 - DNA, 150 bp, Artificial Sequence
  Synthetic polynucleotide
ctaatacgactcactatagcaccagtgtagagccgctcctccactcctcgacgaacgactagtagctgctgccgctccgcccagcagctactagtcgttcgacgcttctgtcacctcttcctaccaacttgaggatacatactggtgagc

SEQ ID NO: 209 - DNA, 150 bp, Artificial Sequence
  Synthetic polynucleotide
ctaatacgactcactatagcaccagtgtagagccgctcctccactcctcgaacgactagtagctgctgcgaccgctccgccaccagcagctactagtcgttcggcttctgtcacctcttcctaccaacttgaggatacatactggtgagc

SEQ ID NO: 210 - DNA, 150 bp, Artificial Sequence
  Synthetic polynucleotide
ctaatacgactcactatagcaccagtgtagagccgctcctccactccgaacgactagtagctgctgctcgaccgctccgccacgctcagcagctactagtcgttcgtctgtcacctcttcctaccaacttgaggatacatactggtgagc

SEQ ID NO: 211 - DNA, 150 bp, Artificial Sequence
  Synthetic polynucleotide
ctaatacgactcactatagcaccagtgtagagccgctcctccgaacgactagtagctgctgcactcctcgaccgctccgccacgcttctgtcagcagctactagtcgttcgcacctcttcctaccaacttgaggatacatactggtgagc

SEQ ID NO: 212 - DNA, 150 bp, Artificial Sequence
  Synthetic polynucleotide
ctaatacgactcactatagcaccagtgtagagccgccgaacgactagtagctgctgtcctccactcctcgaccgctccgccacgcttctgtcacctcagcagctactagtcgttcgcttcctaccaacttgaggatacatactggtgagc

SEQ ID NO: 213 - DNA, 150 bp, Artificial Sequence
  Synthetic polynucleotide
ctaatacgactcactatagcaccagtgtagacgaacgactagtagctgctggccgctcctccactcctcgaccgctccgccacgcttctgtcacctcttcccagcagctactagtcgttcgtaccaacttgaggatacatactggtgagc

SEQ ID NO: 214 - DNA, 150 bp, Artificial Sequence
  Synthetic polynucleotide
ctaatacgactcactatagcaccagtgtagagccgctcctccactcctcgaccgtgaattgccagctggcacgcctcgcgtgccagctggcaattcacgccacgcttctgtcacctcttcctaccaacttgaggatacatactggtgagc

SEQ ID NO: 215 - DNA, 150 bp, Artificial Sequence
  Synthetic polynucleotide
ctaatacgactcactatagcaccagtgtagagccgctcctccactcctcgacctgaattgccagctggcacgcgctccgcgtgccagctggcaattcagccacgcttctgtcacctcttcctaccaacttgaggatacatactggtgagc

SEQ ID NO: 216 - DNA, 150 bp, Artificial Sequence
  Synthetic polynucleotide
ctaatacgactcactatagcaccagtgtagagccgctcctccactcctcgatgaattgccagctggcacgcccgctccgccgcgtgccagctggcaattcaacgcttctgtcacctcttcctaccaacttgaggatacatactggtgagc

SEQ ID NO: 217 - DNA, 150 bp, Artificial Sequence
  Synthetic polynucleotide
ctaatacgactcactatagcaccagtgtagagccgctcctccactccttgaattgccagctggcacgccgaccgctccgccacgcgtgccagctggcaattcagcttctgtcacctcttcctaccaacttgaggatacatactggtgagc

SEQ ID NO: 218 - DNA, 150 bp, Artificial Sequence
  Synthetic polynucleotide
ctaatacgactcactatagcaccagtgtagagccgctcctccactctgaattgccagctggcacgcctcgaccgctccgccacgctgcgtgccagctggcaattcatctgtcacctcttcctaccaacttgaggatacatactggtgagc

SEQ ID NO: 219 - DNA, 150 bp, Artificial Sequence
  Synthetic polynucleotide
ctaatacgactcactatagcaccagtgtagagccgctcctctgaattgccagctggcacgccactcctcgaccgctccgccacgcttctgtgcgtgccagctggcaattcacacctcttcctaccaacttgaggatacatactggtgagc

SEQ ID NO: 220 - DNA, 150 bp, Artificial Sequence
  Synthetic polynucleotide
ctaatacgactcactatagcaccagtgtagagccgctgaattgccagctggcacgctcctccactcctcgaccgctccgccacgcttctgtcacctgcgtgccagctggcaattcacttcctaccaacttgaggatacatactggtgagc

SEQ ID NO: 221 - DNA, 150 bp, Artificial Sequence
  Synthetic polynucleotide
ctaatacgactcactatagcaccagtgtagatgaattgccagctggcacgcgccgctcctccactcctcgaccgctccgccacgcttctgtcacctcttccgcgtgccagctggcaattcataccaacttgaggatacatactggtgagc

SEQ ID NO: 222 - DNA, 150 bp, Artificial Sequence
  Synthetic polynucleotide
ctaatacgactcactatagcaccagtatcacatactctaacacaacatatatgattgagcttgtcactcaagctcaatcatattcactatatgattgagcttgtatacttatactacttcactactacttgaggatacatactggtgagc

SEQ ID NO: 223 - DNA, 150 bp, Artificial Sequence
  Synthetic polynucleotide
ctaatacgactcactatagcaccagtactaatcaccactcaatcacatatatgattgagcttgtcactcaagctcaaatcatatcactatatgattgagcttgtccttcacaatcataccactataacttgaggatacatactggtgagc

SEQ ID NO: 224 - DNA, 150 bp, Artificial Sequence
  Synthetic polynucleotide
ctaatacgactcactatagcaccagtattctattaattccaacacaccatatgattgagcttgtcactcaagctcgaatcatatcactatatgattgagcttgcctaacatcacctaccactcaacacttgaggatacatactggtgagc

SEQ ID NO: 225 - DNA, 150 bp, Artificial Sequence
  Synthetic polynucleotide
ctaatacgactcactatagcaccagtactaattcattcctacttcactatatgattgagcttgtcactcaagctccaatcatatcactatatgattgagcttgcatacttctcctcctaattaccaacttgaggatacatactggtgagc

SEQ ID NO: 226 - DNA, 150 bp, Artificial Sequence
  Synthetic polynucleotide
ctaatacgactcactatagcaccagtttaatcctaccatcctccttaaatatgattgagcttgtcactcaagctcagaaatcatcactatatgattgagcttgatcctcacctccttccaactacaacttgaggatacatactggtgagc

SEQ ID NO: 227 - DNA, 150 bp, Artificial Sequence
  Synthetic polynucleotide
ctaatacgactcactatagcaccagtaatccaatataattatactcacatatgattgagcttgtcactcaagctcgcgaatcatcactatatgattgagcttgcaaccacaacatccataccatccacttgaggatacatactggtgagc

SEQ ID NO: 228 - DNA, 150 bp, Artificial Sequence
  Synthetic polynucleotide
ctaatacgactcactatagcaccagttatacacttcacatacattccaatatgattgagcttgtcactcaagctcctcaatcatcactatatgattgagcttgcattctccaaccatcacatcaacacttgaggatacatactggtgagc

SEQ ID NO: 229 - DNA, 150 bp, Artificial Sequence
  Synthetic polynucleotide
ctaatacgactcactatagcaccagttatactcaatcctccatacaacatatgattgagcttgtcactcaagctctatcatattcactatatgattgagcttgttctacaacatatattccttctaacttgaggatacatactggtgagc

SEQ ID NO: 230 - DNA, 150 bp, Artificial Sequence
  Synthetic polynucleotide
ctaatacgactcactatagcaccagtcatcaatctcaacacttacatcatatgattgagcttgtcactcaagctctatcatattcactatatgattgagcttgcacttcaactcattcaatactctacttgaggatacatactggtgagc

SEQ ID NO: 231 - DNA, 150 bp, Artificial Sequence
  Synthetic polynucleotide
ctaatacgactcactatagcaccagtatatcatcaattattcatcctcatatgattgagcttgtcactcaagctctatcatattcactatatgattgagcttgcctccttcaacaatcctcttcaaacttgaggatacatactggtgagc

SEQ ID NO: 232 - DNA, 150 bp, Artificial Sequence
  Synthetic polynucleotide
ctaatacgactcactatagcaccagtatctaacaatccactctaacctatatgattgagcttgtcactcaagctgtttcatattcactatatgattgagcttgtcctaaccacaattcctatcttcacttgaggatacatactggtgagc

SEQ ID NO: 233 - DNA, 150 bp, Artificial Sequence
  Synthetic polynucleotide
ctaatacgactcactatagcaccagtaattcacatataccacctcacaatatgattgagcttgtcactcaagctgtttcatattcactatatgattgagcttgctattcctcaaccaccaatactcacttgaggatacatactggtgagc

SEQ ID NO: 234 - DNA, 150 bp, Artificial Sequence
  Synthetic polynucleotide
ctaatacgactcactatagcaccagttaactacactcaataactactaatatgattgagcttgtcactcaagctgtttcatattcactatatgattgagcttgctccacttattaatccaatcaccacttgaggatacatactggtgagc

SEQ ID NO: 235 - DNA, 150 bp, Artificial Sequence
  Synthetic polynucleotide
ctaatacgactcactatagcaccagttatctattcacatctctccaatatatgattgagcttgtcactcaagctgttcatatttcactatatgattgagcttgaatccatactcctccattaatatacttgaggatacatactggtgagc

SEQ ID NO: 236 - DNA, 150 bp, Artificial Sequence
  Synthetic polynucleotide
ctaatacgactcactatagcaccagtcatcaattccttatataccttcatatgattgagcttgtcactcaagctgttcatatatcactatatgattgagcttgtaattccacctataacctcctttacttgaggatacatactggtgagc

SEQ ID NO: 237 - DNA, 150 bp, Artificial Sequence
  Synthetic polynucleotide
ctaatacgactcactatagcaccagttcatctctaacttcaacctcctatatgattgagcttgtcactcaagctgttcatatttcactatatgattgagcttgcctccatatcctcataccatcatacttgaggatacatactggtgagc

SEQ ID NO: 238 - DNA, 150 bp, Artificial Sequence
  Synthetic polynucleotide
ctaatacgactcactatagcaccagtatataactaacttattcctctcagacgctaagatgaatcactttcatcttagcgtcttcactagacgctaagatgaaacattccacacataatccatcctacttgaggatacatactggtgagc

SEQ ID NO: 239 - DNA, 150 bp, Artificial Sequence
  Synthetic polynucleotide
ctaatacgactcactatagcaccagtacttctcattaccttccaataaagacgctaagatgaatcactttcatctatagcgtctcactagacgctaagatgaaattaacctccttctcctcaacatacttgaggatacatactggtgagc

SEQ ID NO: 240 - DNA, 150 bp, Artificial Sequence
  Synthetic polynucleotide
ctaatacgactcactatagcaccagttatattaaccttcacctacttcagacgctaagatgaatcactttcatctgtagcgtctcactagacgctaagatgaaacctacctccaacttcaacactcacttgaggatacatactggtgagc

SEQ ID NO: 241 - DNA, 150 bp, Artificial Sequence
  Synthetic polynucleotide
ctaatacgactcactatagcaccagtataatccatactccataataccagacgctaagatgaatcactttcatctctagcgtctcactagacgctaagatgaaataactaccactccatccaataaacttgaggatacatactggtgagc

SEQ ID NO: 242 - DNA, 150 bp, Artificial Sequence
  Synthetic polynucleotide
ctaatacgactcactatagcaccagtttataactaattcacaccactaagacgctaagatgaatcactttcatctagatagcgtcactagacgctaagatgaacaactcaactccttccatctcaaacttgaggatacatactggtgagc

SEQ ID NO: 243 - DNA, 150 bp, Artificial Sequence
  Synthetic polynucleotide
ctaatacgactcactatagcaccagtattcattaacttatccttcacaagacgctaagatgaatcactttcatctgcgtagcgtcactagacgctaagatgaactccaaccacacaacctcataatacttgaggatacatactggtgagc

SEQ ID NO: 244 - DNA, 150 bp, Artificial Sequence
  Synthetic polynucleotide
ctaatacgactcactatagcaccagtacaaccttactatcactaatccagacgctaagatgaatcactttcatctctctagcgtcactagacgctaagatgaatctatacaccacttcaaccaaccacttgaggatacatactggtgagc

SEQ ID NO: 245 - DNA, 150 bp, Artificial Sequence
  Synthetic polynucleotide
ctaatacgactcactatagcaccagttactctccattaactaacaatcagacgctaagatgaatcactttcatctaagcgtcttcactagacgctaagatgaacattcttcacaactccactactaacttgaggatacatactggtgagc

SEQ ID NO: 246 - DNA, 150 bp, Artificial Sequence
  Synthetic polynucleotide
ctaatacgactcactatagcaccagtacttataccaccaataattcacagacgctaagatgaatcactttcatctaagcgtcttcactagacgctaagatgaattccttaccacttacctccttccacttgaggatacatactggtgagc

SEQ ID NO: 247 - DNA, 150 bp, Artificial Sequence
  Synthetic polynucleotide
ctaatacgactcactatagcaccagttccatcacctacctaatccaacagacgctaagatgaatcactttcatctaagcgtcttcactagacgctaagatgaatactacctccttccaatcaatacacttgaggatacatactggtgagc

SEQ ID NO: 248 - DNA, 150 bp, Artificial Sequence
  Synthetic polynucleotide
ctaatacgactcactatagcaccagtctaatctcctcaaccttcaactagacgctaagatgaatcactttcatcaatgcgtcttcactagacgctaagatgaatacctccaacaattcttccactaacttgaggatacatactggtgagc

SEQ ID NO: 249 - DNA, 150 bp, Artificial Sequence
  Synthetic polynucleotide
ctaatacgactcactatagcaccagtatatcaccaattccatcttataagacgctaagatgaatcactttcatcaatgcgtcttcactagacgctaagatgaaaatacaaccttacatcttcacacacttgaggatacatactggtgagc

SEQ ID NO: 250 - DNA, 150 bp, Artificial Sequence
  Synthetic polynucleotide
ctaatacgactcactatagcaccagtatatcacaataacacctcacctagacgctaagatgaatcactttcatcaatgcgtcttcactagacgctaagatgaatcacaacctcattaccacatcacacttgaggatacatactggtgagc

SEQ ID NO: 251 - DNA, 150 bp, Artificial Sequence
  Synthetic polynucleotide
ctaatacgactcactatagcaccagtaatatcactaccactatctattagacgctaagatgaatcactttcatcatgcgtctctcactagacgctaagatgaataaccattacactactaattcttacttgaggatacatactggtgagc

SEQ ID NO: 252 - DNA, 150 bp, Artificial Sequence
  Synthetic polynucleotide
ctaatacgactcactatagcaccagtttaataccatccattccatccaagacgctaagatgaatcactttcatcatgcgtctttcactagacgctaagatgaatatcttccatccacacctctaatacttgaggatacatactggtgagc

SEQ ID NO: 253 - DNA, 150 bp, Artificial Sequence
  Synthetic polynucleotide
ctaatacgactcactatagcaccagtaattccacctcctaacacctacagacgctaagatgaatcactttcatcatgcgtctctcactagacgctaagatgaaacaccacttacttacctcaccatacttgaggatacatactggtgagc

SEQ ID NO: 254 - DNA, 150 bp, Artificial Sequence
  Synthetic polynucleotide
ctaatacgactcactatagcaccagtcaccaacaacctaacttacatttgagagtaggtgcgatcacttcgcacctactctcatcacttgagagtaggtgcgaccattaatatcctctcttaacctacttgaggatacatactggtgagc

SEQ ID NO: 255 - DNA, 150 bp, Artificial Sequence
  Synthetic polynucleotide
ctaatacgactcactatagcaccagtctaatatctcactctccattactgagagtaggtgcgatcacttcgcaccatactctctcacttgagagtaggtgcgatactattaaccatccaactcaccacttgaggatacatactggtgagc

SEQ ID NO: 256 - DNA, 150 bp, Artificial Sequence
  Synthetic polynucleotide
ctaatacgactcactatagcaccagtacttaatccaataacaccatcctgagagtaggtgcgatcacttcgcaccgtactctctcacttgagagtaggtgcgactcctacaacatccaattctcttacttgaggatacatactggtgagc

SEQ ID NO: 257 - DNA, 150 bp, Artificial Sequence
  Synthetic polynucleotide
ctaatacgactcactatagcaccagttcataattcctactcaacttcatgagagtaggtgcgatcacttcgcaccctactctctcacttgagagtaggtgcgacactacctactcctcacaatataacttgaggatacatactggtgagc

SEQ ID NO: 258 - DNA, 150 bp, Artificial Sequence
  Synthetic polynucleotide
ctaatacgactcactatagcaccagtatatctaacttccttcatcaactgagagtaggtgcgatcacttcgcaccagatactctcacttgagagtaggtgcgactccttataccattacctaccacacttgaggatacatactggtgagc

SEQ ID NO: 259 - DNA, 150 bp, Artificial Sequence
  Synthetic polynucleotide
ctaatacgactcactatagcaccagtacttaatcaacacaccaccaattgagagtaggtgcgatcacttcgcaccgcgtactctcacttgagagtaggtgcgaaccaactcatccttaacctcctaacttgaggatacatactggtgagc

SEQ ID NO: 260 - DNA, 150 bp, Artificial Sequence
  Synthetic polynucleotide
ctaatacgactcactatagcaccagtatccataccatactcacaatcatgagagtaggtgcgatcacttcgcaccctctactctcacttgagagtaggtgcgatactacttctctccaatcctaccacttgaggatacatactggtgagc

SEQ ID NO: 261 - DNA, 150 bp, Artificial Sequence
  Synthetic polynucleotide
ctaatacgactcactatagcaccagttatcttcatctaacctatactttgagagtaggtgcgatcacttcgcaccaactctcatcacttgagagtaggtgcgaattaattaaccttcaaccacaatacttgaggatacatactggtgagc

SEQ ID NO: 262 - DNA, 150 bp, Artificial Sequence
  Synthetic polynucleotide
ctaatacgactcactatagcaccagtcaatataactccacctaactaatgagagtaggtgcgatcacttcgcaccaactctcatcacttgagagtaggtgcgatccaatcaccaccaaccttatccacttgaggatacatactggtgagc

SEQ ID NO: 263 - DNA, 150 bp, Artificial Sequence
  Synthetic polynucleotide
ctaatacgactcactatagcaccagtataccacattctcaataacctatgagagtaggtgcgatcacttcgcaccaactctcatcacttgagagtaggtgcgaataccttacttccatattaccttacttgaggatacatactggtgagc

SEQ ID NO: 264 - DNA, 150 bp, Artificial Sequence
  Synthetic polynucleotide
ctaatacgactcactatagcaccagtcaactaccttaaccaacttctttgagagtaggtgcgatcacttcgcacgatctctcatcacttgagagtaggtgcgattctcctcctatatccatcaaccacttgaggatacatactggtgagc

SEQ ID NO: 265 - DNA, 150 bp, Artificial Sequence
  Synthetic polynucleotide
ctaatacgactcactatagcaccagtacttcctataacttaatcctcctgagagtaggtgcgatcacttcgcacgatctctcatcacttgagagtaggtgcgatccattaacttaccttacaccacacttgaggatacatactggtgagc

SEQ ID NO: 266 - DNA, 150 bp, Artificial Sequence
  Synthetic polynucleotide
ctaatacgactcactatagcaccagtatcttaatacttccaattcctttgagagtaggtgcgatcacttcgcacgatctctcatcacttgagagtaggtgcgatatacttacatcaactccataacacttgaggatacatactggtgagc

SEQ ID NO: 267 - DNA, 150 bp, Artificial Sequence
  Synthetic polynucleotide
ctaatacgactcactatagcaccagtaatcatccaacttcctatataatgagagtaggtgcgatcacttcgcacgtctctcattcacttgagagtaggtgcgatcctctccaattatcataactttacttgaggatacatactggtgagc

SEQ ID NO: 268 - DNA, 150 bp, Artificial Sequence
  Synthetic polynucleotide
ctaatacgactcactatagcaccagtccatcatcctccataatcacactgagagtaggtgcgatcacttcgcacgtctctcattcacttgagagtaggtgcgacaccaacaacttaactaacacatacttgaggatacatactggtgagc

SEQ ID NO: 269 - DNA, 150 bp, Artificial Sequence
  Synthetic polynucleotide
ctaatacgactcactatagcaccagtctccttattaaccattccaccttgagagtaggtgcgatcacttcgcacgtctctcattcacttgagagtaggtgcgacctccttattccatcactatcctacttgaggatacatactggtgagc

SEQ ID NO: 270 - DNA, 150 bp, Artificial Sequence
  Synthetic polynucleotide
ctaatacgactcactatagcaccagtccacttaccttcaacataccatcggacgttggtggtctcactgaccaccaacgtccgtcactcggacgttggtggtcacctaatatcctccttaccttcaacttgaggatacatactggtgagc

SEQ ID NO: 271 - DNA, 150 bp, Artificial Sequence
  Synthetic polynucleotide
ctaatacgactcactatagcaccagttctaatctaatctcacaccacccggacgttggtggtctcactgaccaccaaacgtcctcactcggacgttggtggtcaccatactcttcctcaaccaataacttgaggatacatactggtgagc

SEQ ID NO: 272 - DNA, 150 bp, Artificial Sequence
  Synthetic polynucleotide
ctaatacgactcactatagcaccagtataattacctaacctccataaccggacgttggtggtctcactgaccaccgaacgtcctcactcggacgttggtggtcattcataaccttcacctcttacaacttgaggatacatactggtgagc

SEQ ID NO: 273 - DNA, 150 bp, Artificial Sequence
  Synthetic polynucleotide
ctaatacgactcactatagcaccagtaataacctcttcacacaacattcggacgttggtggtctcactgaccacccaacgtcctcactcggacgttggtggtctcttcatcctataatccatactcacttgaggatacatactggtgagc

SEQ ID NO: 274 - DNA, 150 bp, Artificial Sequence
  Synthetic polynucleotide
ctaatacgactcactatagcaccagtcctatattatccaacaccatcacggacgttggtggtctcactgaccaccagaaacgttcactcggacgttggtggtcacttatcctccttaatccaacatacttgaggatacatactggtgagc

SEQ ID NO: 275 - DNA, 150 bp, Artificial Sequence
  Synthetic polynucleotide
ctaatacgactcactatagcaccagttaatcaaccttaattaccatcacggacgttggtggtctcactgaccaccgcgaacgttcactcggacgttggtggtccactacacatctcactccttattacttgaggatacatactggtgagc

SEQ ID NO: 276 - DNA, 150 bp, Artificial Sequence
  Synthetic polynucleotide
ctaatacgactcactatagcaccagtattacacattaatattctccaacggacgttggtggtctcactgaccaccctcaacgttcactcggacgttggtggtcaccttcatatacaataccacattacttgaggatacatactggtgagc

SEQ ID NO: 277 - DNA, 150 bp, Artificial Sequence
  Synthetic polynucleotide
ctaatacgactcactatagcaccagtatactccaatccaaccaccaatcggacgttggtggtctcactgaccacctacgtccgtcactcggacgttggtggtccacttccaactacttaattccttacttgaggatacatactggtgagc

SEQ ID NO: 278 - DNA, 150 bp, Artificial Sequence
  Synthetic polynucleotide
ctaatacgactcactatagcaccagttatcaccttctcttccaatccacggacgttggtggtctcactgaccacctacgtccgtcactcggacgttggtggtctctctaattcaccttcaccatcaacttgaggatacatactggtgagc

SEQ ID NO: 279 - DNA, 150 bp, Artificial Sequence
  Synthetic polynucleotide
ctaatacgactcactatagcaccagtaatacacctacttaccaattctcggacgttggtggtctcactgaccacctacgtccgtcactcggacgttggtggtccttctatcatataccatctaattacttgaggatacatactggtgagc

SEQ ID NO: 280 - DNA, 150 bp, Artificial Sequence
  Synthetic polynucleotide
ctaatacgactcactatagcaccagttatccatactaaccataccttccggacgttggtggtctcactgaccacgttcgtccgtcactcggacgttggtggtccaactacttcataccactctcacacttgaggatacatactggtgagc

SEQ ID NO: 281 - DNA, 150 bp, Artificial Sequence
  Synthetic polynucleotide
ctaatacgactcactatagcaccagtttccaatcacacattcctacaacggacgttggtggtctcactgaccacgttcgtccgtcactcggacgttggtggtctccaatccatactaccttcctctacttgaggatacatactggtgagc

SEQ ID NO: 282 - DNA, 150 bp, Artificial Sequence
  Synthetic polynucleotide
ctaatacgactcactatagcaccagtatctactccttctaaccttctacggacgttggtggtctcactgaccacgttcgtccgtcactcggacgttggtggtcttccatcctctactctctatcctacttgaggatacatactggtgagc

SEQ ID NO: 283 - DNA, 150 bp, Artificial Sequence
  Synthetic polynucleotide
ctaatacgactcactatagcaccagttacttcctcaactccattatctcggacgttggtggtctcactgaccacgtcgtccgatcactcggacgttggtggtcacctccattcaacactaacacctacttgaggatacatactggtgagc

SEQ ID NO: 284 - DNA, 150 bp, Artificial Sequence
  Synthetic polynucleotide
ctaatacgactcactatagcaccagtaatcttcctaacattcactaaccggacgttggtggtctcactgaccacgtcgtccgttcactcggacgttggtggtccatcatcctaacttcctaactctacttgaggatacatactggtgagc

SEQ ID NO: 285 - DNA, 150 bp, Artificial Sequence
  Synthetic polynucleotide
ctaatacgactcactatagcaccagttaataccttccacctattactccggacgttggtggtctcactgaccacgtcgtccgctcactcggacgttggtggtcttccaaccacactccattaacttacttgaggatacatactggtgagc

SEQ ID NO: 286 - DNA, 150 bp, Artificial Sequence
  Synthetic polynucleotide
ctaatacgactcactatagcaccagtatctactaccacttattcctctcgaggcggccttacgtcactcgtaaggccgcctcgtcactcgaggcggccttacgtccacatcaccactacaacaattacttgaggatacatactggtgagc

SEQ ID NO: 287 - DNA, 150 bp, Artificial Sequence
  Synthetic polynucleotide
ctaatacgactcactatagcaccagtacatacaccattacctcattcacgaggcggccttacgtcactcgtaaggaccgcctctcactcgaggcggccttacgttaaccattaactatacttccttacttgaggatacatactggtgagc

SEQ ID NO: 288 - DNA, 150 bp, Artificial Sequence
  Synthetic polynucleotide
ctaatacgactcactatagcaccagtcttacatattacacttaacctccgaggcggccttacgtcactcgtaagggccgcctctcactcgaggcggccttacgacctcatcctaacttcctaactcacttgaggatacatactggtgagc

SEQ ID NO: 289 - DNA, 150 bp, Artificial Sequence
  Synthetic polynucleotide
ctaatacgactcactatagcaccagttattcaacactccactaatcaacgaggcggccttacgtcactcgtaaggcccgcctctcactcgaggcggccttacgcaccatcctattacatcacaacaacttgaggatacatactggtgagc

SEQ ID NO: 290 - DNA, 150 bp, Artificial Sequence
  Synthetic polynucleotide
ctaatacgactcactatagcaccagtaacattcttcacacttaatccacgaggcggccttacgtcactcgtaaggagaccgcctcactcgaggcggccttacgataccttccatctcttaccaacaacttgaggatacatactggtgagc

SEQ ID NO: 291 - DNA, 150 bp, Artificial Sequence
  Synthetic polynucleotide
ctaatacgactcactatagcaccagttaacacataacttccaccataacgaggcggccttacgtcactcgtaagggcgccgcctcactcgaggcggccttacgctattacctccttcataatccatacttgaggatacatactggtgagc

SEQ ID NO: 292 - DNA, 150 bp, Artificial Sequence
  Synthetic polynucleotide
ctaatacgactcactatagcaccagttaattccatatccttctccacccgaggcggccttacgtcactcgtaaggctcccgcctcactcgaggcggccttacgctaacatctatacatccaccaacacttgaggatacatactggtgagc

SEQ ID NO: 293 - DNA, 150 bp, Artificial Sequence
  Synthetic polynucleotide
ctaatacgactcactatagcaccagtttcaacttctacttccttcacccgaggcggccttacgtcactcgtaagggcgcctcgtcactcgaggcggccttacgttccacaatcaataccatcacatacttgaggatacatactggtgagc

SEQ ID NO: 294 - DNA, 150 bp, Artificial Sequence
  Synthetic polynucleotide
ctaatacgactcactatagcaccagttccattcataactacctaacaccgaggcggccttacgtcactcgtaagggcgcctcgtcactcgaggcggccttacgaataaccttccaccaatcaaccaacttgaggatacatactggtgagc

SEQ ID NO: 295 - DNA, 150 bp, Artificial Sequence
  Synthetic polynucleotide
ctaatacgactcactatagcaccagtttaaccacaattatccattaatcgaggcggccttacgtcactcgtaagggcgcctcgtcactcgaggcggccttacgcttcttaactacaccttaatcttacttgaggatacatactggtgagc

SEQ ID NO: 296 - DNA, 150 bp, Artificial Sequence
  Synthetic polynucleotide
ctaatacgactcactatagcaccagtttcaataaccaacatacctctacgaggcggccttacgtcactcgtaagcgggcctcgtcactcgaggcggccttacgctccataacaattctcctacaatacttgaggatacatactggtgagc

SEQ ID NO: 297 - DNA, 150 bp, Artificial Sequence
  Synthetic polynucleotide
ctaatacgactcactatagcaccagtctattctactccacaccatcaacgaggcggccttacgtcactcgtaagcgggcctcgtcactcgaggcggccttacgcaccaatattcttaactcctcctacttgaggatacatactggtgagc

SEQ ID NO: 298 - DNA, 150 bp, Artificial Sequence
  Synthetic polynucleotide
ctaatacgactcactatagcaccagtaatactccttactatatccattcgaggcggccttacgtcactcgtaagcgggcctcgtcactcgaggcggccttacgtcacctacaacatacctctccttacttgaggatacatactggtgagc

SEQ ID NO: 299 - DNA, 150 bp, Artificial Sequence
  Synthetic polynucleotide
ctaatacgactcactatagcaccagtttcaacaattattccaacatcacgaggcggccttacgtcactcgtaagcggcctcgatcactcgaggcggccttacgcatcaacctaatcaatacctcatacttgaggatacatactggtgagc

SEQ ID NO: 300 - DNA, 150 bp, Artificial Sequence
  Synthetic polynucleotide
ctaatacgactcactatagcaccagtccataatcctatatcataccaacgaggcggccttacgtcactcgtaagcggcctcgatcactcgaggcggccttacgctccattcctccacctcattcatacttgaggatacatactggtgagc

SEQ ID NO: 301 - DNA, 150 bp, Artificial Sequence
  Synthetic polynucleotide
ctaatacgactcactatagcaccagtataataccacaattccttcacccgaggcggccttacgtcactcgtaagcggcctcgatcactcgaggcggccttacgtctatataatctctcactaacttacttgaggatacatactggtgagc

SEQ ID NO: 302 - DNA, 150 bp, Artificial Sequence
  Synthetic polynucleotide
ctaatacgactcactatagcaccagtcatactctaacacaacataaatatgattgagcttgtcactcaagctcaatcatattttcactatatgattgagcttgtatacttatactacttcactactacttgaggatacatactggtgagc

SEQ ID NO: 303 - DNA, 150 bp, Artificial Sequence
  Synthetic polynucleotide
ctaatacgactcactatagcaccagtcatactctaacacaacatagatatgattgagcttgtcactcaagctcaatcatatcttcactatatgattgagcttgtatacttatactacttcactactacttgaggatacatactggtgagc

SEQ ID NO: 304 - DNA, 150 bp, Artificial Sequence
  Synthetic polynucleotide
ctaatacgactcactatagcaccagtcatactctaacacaacatacatatgattgagcttgtcactcaagctcaatcatatgttcactatatgattgagcttgtatacttatactacttcactactacttgaggatacatactggtgagc

SEQ ID NO: 305 - DNA, 150 bp, Artificial Sequence
  Synthetic polynucleotide
ctaatacgactcactatagcaccagtcatactctaacacaacatatatatgattgagcttgtcactcaagctcaatcatatattcactatatgattgagcttgtatacttatactacttcactactacttgaggatacatactggtgagc

SEQ ID NO: 306 - DNA, 150 bp, Artificial Sequence
  Synthetic polynucleotide
ctaatacgactcactatagcaccagtcatactctaacacaacatgaatatgattgagcttgtcactcaagctcaatcatattctcactatatgattgagcttgtatacttatactacttcactactacttgaggatacatactggtgagc

SEQ ID NO: 307 - DNA, 150 bp, Artificial Sequence
  Synthetic polynucleotide
ctaatacgactcactatagcaccagtcatactctaacacaacatggatatgattgagcttgtcactcaagctcaatcatatcctcactatatgattgagcttgtatacttatactacttcactactacttgaggatacatactggtgagc

SEQ ID NO: 308 - DNA, 150 bp, Artificial Sequence
  Synthetic polynucleotide
ctaatacgactcactatagcaccagtcatactctaacacaacatgcatatgattgagcttgtcactcaagctcaatcatatgctcactatatgattgagcttgtatacttatactacttcactactacttgaggatacatactggtgagc

SEQ ID NO: 309 - DNA, 150 bp, Artificial Sequence
  Synthetic polynucleotide
ctaatacgactcactatagcaccagtcatactctaacacaacatgtatatgattgagcttgtcactcaagctcaatcatatactcactatatgattgagcttgtatacttatactacttcactactacttgaggatacatactggtgagc

SEQ ID NO: 310 - DNA, 150 bp, Artificial Sequence
  Synthetic polynucleotide
ctaatacgactcactatagcaccagtcatactctaacacaacatcaatatgattgagcttgtcactcaagctcaatcatattgtcactatatgattgagcttgtatacttatactacttcactactacttgaggatacatactggtgagc

SEQ ID NO: 311 - DNA, 150 bp, Artificial Sequence
  Synthetic polynucleotide
ctaatacgactcactatagcaccagtcatactctaacacaacatcgatatgattgagcttgtcactcaagctcaatcatatcgtcactatatgattgagcttgtatacttatactacttcactactacttgaggatacatactggtgagc

SEQ ID NO: 312 - DNA, 150 bp, Artificial Sequence
  Synthetic polynucleotide
ctaatacgactcactatagcaccagtcatactctaacacaacatccatatgattgagcttgtcactcaagctcaatcatatggtcactatatgattgagcttgtatacttatactacttcactactacttgaggatacatactggtgagc

SEQ ID NO: 313 - DNA, 150 bp, Artificial Sequence
  Synthetic polynucleotide
ctaatacgactcactatagcaccagtcatactctaacacaacatctatatgattgagcttgtcactcaagctcaatcatatagtcactatatgattgagcttgtatacttatactacttcactactacttgaggatacatactggtgagc

SEQ ID NO: 314 - DNA, 150 bp, Artificial Sequence
  Synthetic polynucleotide
ctaatacgactcactatagcaccagtcatactctaacacaacattaatatgattgagcttgtcactcaagctcaatcatattatcactatatgattgagcttgtatacttatactacttcactactacttgaggatacatactggtgagc

SEQ ID NO: 315 - DNA, 150 bp, Artificial Sequence
  Synthetic polynucleotide
ctaatacgactcactatagcaccagtcatactctaacacaacattgatatgattgagcttgtcactcaagctcaatcatatcatcactatatgattgagcttgtatacttatactacttcactactacttgaggatacatactggtgagc

SEQ ID NO: 316 - DNA, 150 bp, Artificial Sequence
  Synthetic polynucleotide
ctaatacgactcactatagcaccagtcatactctaacacaacattcatatgattgagcttgtcactcaagctcaatcatatgatcactatatgattgagcttgtatacttatactacttcactactacttgaggatacatactggtgagc

SEQ ID NO: 317 - DNA, 150 bp, Artificial Sequence
  Synthetic polynucleotide
ctaatacgactcactatagcaccagtcatactctaacacaacatttatatgattgagcttgtcactcaagctcaatcatataatcactatatgattgagcttgtatacttatactacttcactactacttgaggatacatactggtgagc

SEQ ID NO: 318 - DNA, 150 bp, Artificial Sequence
  Synthetic polynucleotide
ctaatacgactcactatagcaccagtaactaacttattcctctcaaagacgctaagatgaatcactttcatcttagcgtcttttcactagacgctaagatgaaacattccacacataatccatcctacttgaggatacatactggtgagc

SEQ ID NO: 319 - DNA, 150 bp, Artificial Sequence
  Synthetic polynucleotide
ctaatacgactcactatagcaccagtaactaacttattcctctcagagacgctaagatgaatcactttcatcttagcgtctcttcactagacgctaagatgaaacattccacacataatccatcctacttgaggatacatactggtgagc

SEQ ID NO: 320 - DNA, 150 bp, Artificial Sequence
  Synthetic polynucleotide
ctaatacgactcactatagcaccagtaactaacttattcctctcacagacgctaagatgaatcactttcatcttagcgtctgttcactagacgctaagatgaaacattccacacataatccatcctacttgaggatacatactggtgagc

SEQ ID NO: 321 - DNA, 150 bp, Artificial Sequence
  Synthetic polynucleotide
ctaatacgactcactatagcaccagtaactaacttattcctctcatagacgctaagatgaatcactttcatcttagcgtctattcactagacgctaagatgaaacattccacacataatccatcctacttgaggatacatactggtgagc

SEQ ID NO: 322 - DNA, 150 bp, Artificial Sequence
  Synthetic polynucleotide
ctaatacgactcactatagcaccagtaactaacttattcctctcgaagacgctaagatgaatcactttcatcttagcgtcttctcactagacgctaagatgaaacattccacacataatccatcctacttgaggatacatactggtgagc

SEQ ID NO: 323 - DNA, 150 bp, Artificial Sequence
  Synthetic polynucleotide
ctaatacgactcactatagcaccagtaactaacttattcctctcggagacgctaagatgaatcactttcatcttagcgtctcctcactagacgctaagatgaaacattccacacataatccatcctacttgaggatacatactggtgagc

SEQ ID NO: 324 - DNA, 150 bp, Artificial Sequence
  Synthetic polynucleotide
ctaatacgactcactatagcaccagtaactaacttattcctctcgcagacgctaagatgaatcactttcatcttagcgtctgctcactagacgctaagatgaaacattccacacataatccatcctacttgaggatacatactggtgagc

SEQ ID NO: 325 - DNA, 150 bp, Artificial Sequence
  Synthetic polynucleotide
ctaatacgactcactatagcaccagtaactaacttattcctctcgtagacgctaagatgaatcactttcatcttagcgtctactcactagacgctaagatgaaacattccacacataatccatcctacttgaggatacatactggtgagc

SEQ ID NO: 326 - DNA, 150 bp, Artificial Sequence
  Synthetic polynucleotide
ctaatacgactcactatagcaccagtaactaacttattcctctccaagacgctaagatgaatcactttcatcttagcgtcttgtcactagacgctaagatgaaacattccacacataatccatcctacttgaggatacatactggtgagc

SEQ ID NO: 327 - DNA, 150 bp, Artificial Sequence
  Synthetic polynucleotide
ctaatacgactcactatagcaccagtaactaacttattcctctccgagacgctaagatgaatcactttcatcttagcgtctcgtcactagacgctaagatgaaacattccacacataatccatcctacttgaggatacatactggtgagc

SEQ ID NO: 328 - DNA, 150 bp, Artificial Sequence
  Synthetic polynucleotide
ctaatacgactcactatagcaccagtaactaacttattcctctcccagacgctaagatgaatcactttcatcttagcgtctggtcactagacgctaagatgaaacattccacacataatccatcctacttgaggatacatactggtgagc

SEQ ID NO: 329 - DNA, 150 bp, Artificial Sequence
  Synthetic polynucleotide
ctaatacgactcactatagcaccagtaactaacttattcctctcctagacgctaagatgaatcactttcatcttagcgtctagtcactagacgctaagatgaaacattccacacataatccatcctacttgaggatacatactggtgagc

SEQ ID NO: 330 - DNA, 150 bp, Artificial Sequence
  Synthetic polynucleotide
ctaatacgactcactatagcaccagtaactaacttattcctctctaagacgctaagatgaatcactttcatcttagcgtcttatcactagacgctaagatgaaacattccacacataatccatcctacttgaggatacatactggtgagc

SEQ ID NO: 331 - DNA, 150 bp, Artificial Sequence
  Synthetic polynucleotide
ctaatacgactcactatagcaccagtaactaacttattcctctctgagacgctaagatgaatcactttcatcttagcgtctcatcactagacgctaagatgaaacattccacacataatccatcctacttgaggatacatactggtgagc

SEQ ID NO: 332 - DNA, 150 bp, Artificial Sequence
  Synthetic polynucleotide
ctaatacgactcactatagcaccagtaactaacttattcctctctcagacgctaagatgaatcactttcatcttagcgtctgatcactagacgctaagatgaaacattccacacataatccatcctacttgaggatacatactggtgagc

SEQ ID NO: 333 - DNA, 150 bp, Artificial Sequence
  Synthetic polynucleotide
ctaatacgactcactatagcaccagtaactaacttattcctctcttagacgctaagatgaatcactttcatcttagcgtctaatcactagacgctaagatgaaacattccacacataatccatcctacttgaggatacatactggtgagc

SEQ ID NO: 334 - DNA, 150 bp, Artificial Sequence
  Synthetic polynucleotide
ctaatacgactcactatagcaccagtaacaacctaacttacattaatgagagtaggtgcgatcacttcgcacctactctcatttcacttgagagtaggtgcgaccattaatatcctctcttaacctacttgaggatacatactggtgagc

SEQ ID NO: 335 - DNA, 150 bp, Artificial Sequence
  Synthetic polynucleotide
ctaatacgactcactatagcaccagtaacaacctaacttacattagtgagagtaggtgcgatcacttcgcacctactctcacttcacttgagagtaggtgcgaccattaatatcctctcttaacctacttgaggatacatactggtgagc

SEQ ID NO: 336 - DNA, 150 bp, Artificial Sequence
  Synthetic polynucleotide
ctaatacgactcactatagcaccagtaacaacctaacttacattactgagagtaggtgcgatcacttcgcacctactctcagttcacttgagagtaggtgcgaccattaatatcctctcttaacctacttgaggatacatactggtgagc

SEQ ID NO: 337 - DNA, 150 bp, Artificial Sequence
  Synthetic polynucleotide
ctaatacgactcactatagcaccagtaacaacctaacttacattattgagagtaggtgcgatcacttcgcacctactctcaattcacttgagagtaggtgcgaccattaatatcctctcttaacctacttgaggatacatactggtgagc

SEQ ID NO: 338 - DNA, 150 bp, Artificial Sequence
  Synthetic polynucleotide
ctaatacgactcactatagcaccagtaacaacctaacttacattgatgagagtaggtgcgatcacttcgcacctactctcatctcacttgagagtaggtgcgaccattaatatcctctcttaacctacttgaggatacatactggtgagc

SEQ ID NO: 339 - DNA, 150 bp, Artificial Sequence
  Synthetic polynucleotide
ctaatacgactcactatagcaccagtaacaacctaacttacattggtgagagtaggtgcgatcacttcgcacctactctcacctcacttgagagtaggtgcgaccattaatatcctctcttaacctacttgaggatacatactggtgagc

SEQ ID NO: 340 - DNA, 150 bp, Artificial Sequence
  Synthetic polynucleotide
ctaatacgactcactatagcaccagtaacaacctaacttacattgctgagagtaggtgcgatcacttcgcacctactctcagctcacttgagagtaggtgcgaccattaatatcctctcttaacctacttgaggatacatactggtgagc

SEQ ID NO: 341 - DNA, 150 bp, Artificial Sequence
  Synthetic polynucleotide
ctaatacgactcactatagcaccagtaacaacctaacttacattgttgagagtaggtgcgatcacttcgcacctactctcaactcacttgagagtaggtgcgaccattaatatcctctcttaacctacttgaggatacatactggtgagc

SEQ ID NO: 342 - DNA, 150 bp, Artificial Sequence
  Synthetic polynucleotide
ctaatacgactcactatagcaccagtaacaacctaacttacattcatgagagtaggtgcgatcacttcgcacctactctcatgtcacttgagagtaggtgcgaccattaatatcctctcttaacctacttgaggatacatactggtgagc

SEQ ID NO: 343 - DNA, 150 bp, Artificial Sequence
  Synthetic polynucleotide
ctaatacgactcactatagcaccagtaacaacctaacttacattcgtgagagtaggtgcgatcacttcgcacctactctcacgtcacttgagagtaggtgcgaccattaatatcctctcttaacctacttgaggatacatactggtgagc

SEQ ID NO: 344 - DNA, 150 bp, Artificial Sequence
  Synthetic polynucleotide
ctaatacgactcactatagcaccagtaacaacctaacttacattcctgagagtaggtgcgatcacttcgcacctactctcaggtcacttgagagtaggtgcgaccattaatatcctctcttaacctacttgaggatacatactggtgagc

SEQ ID NO: 345 - DNA, 150 bp, Artificial Sequence
  Synthetic polynucleotide
ctaatacgactcactatagcaccagtaacaacctaacttacattcttgagagtaggtgcgatcacttcgcacctactctcaagtcacttgagagtaggtgcgaccattaatatcctctcttaacctacttgaggatacatactggtgagc

SEQ ID NO: 346 - DNA, 150 bp, Artificial Sequence
  Synthetic polynucleotide
ctaatacgactcactatagcaccagtaacaacctaacttacatttatgagagtaggtgcgatcacttcgcacctactctcatatcacttgagagtaggtgcgaccattaatatcctctcttaacctacttgaggatacatactggtgagc

SEQ ID NO: 347 - DNA, 150 bp, Artificial Sequence
  Synthetic polynucleotide
ctaatacgactcactatagcaccagtaacaacctaacttacatttgtgagagtaggtgcgatcacttcgcacctactctcacatcacttgagagtaggtgcgaccattaatatcctctcttaacctacttgaggatacatactggtgagc

SEQ ID NO: 348 - DNA, 150 bp, Artificial Sequence
  Synthetic polynucleotide
ctaatacgactcactatagcaccagtaacaacctaacttacatttctgagagtaggtgcgatcacttcgcacctactctcagatcacttgagagtaggtgcgaccattaatatcctctcttaacctacttgaggatacatactggtgagc

SEQ ID NO: 349 - DNA, 150 bp, Artificial Sequence
  Synthetic polynucleotide
ctaatacgactcactatagcaccagtaacaacctaacttacatttttgagagtaggtgcgatcacttcgcacctactctcaaatcacttgagagtaggtgcgaccattaatatcctctcttaacctacttgaggatacatactggtgagc

SEQ ID NO: 350 - DNA, 150 bp, Artificial Sequence
  Synthetic polynucleotide
ctaatacgactcactatagcaccagtttaccttcaacataccataacggacgttggtggtctcactgaccaccaacgtccgtttcactcggacgttggtggtcacctaatatcctccttaccttcaacttgaggatacatactggtgagc

SEQ ID NO: 351 - DNA, 150 bp, Artificial Sequence
  Synthetic polynucleotide
ctaatacgactcactatagcaccagtttaccttcaacataccatagcggacgttggtggtctcactgaccaccaacgtccgcttcactcggacgttggtggtcacctaatatcctccttaccttcaacttgaggatacatactggtgagc

SEQ ID NO: 352 - DNA, 150 bp, Artificial Sequence
  Synthetic polynucleotide
ctaatacgactcactatagcaccagtttaccttcaacataccataccggacgttggtggtctcactgaccaccaacgtccggttcactcggacgttggtggtcacctaatatcctccttaccttcaacttgaggatacatactggtgagc

SEQ ID NO: 353 - DNA, 150 bp, Artificial Sequence
  Synthetic polynucleotide
ctaatacgactcactatagcaccagtttaccttcaacataccatatcggacgttggtggtctcactgaccaccaacgtccgattcactcggacgttggtggtcacctaatatcctccttaccttcaacttgaggatacatactggtgagc

SEQ ID NO: 354 - DNA, 150 bp, Artificial Sequence
  Synthetic polynucleotide
ctaatacgactcactatagcaccagtttaccttcaacataccatgacggacgttggtggtctcactgaccaccaacgtccgtctcactcggacgttggtggtcacctaatatcctccttaccttcaacttgaggatacatactggtgagc

SEQ ID NO: 355 - DNA, 150 bp, Artificial Sequence
  Synthetic polynucleotide
ctaatacgactcactatagcaccagtttaccttcaacataccatggcggacgttggtggtctcactgaccaccaacgtccgcctcactcggacgttggtggtcacctaatatcctccttaccttcaacttgaggatacatactggtgagc

SEQ ID NO: 356 - DNA, 150 bp, Artificial Sequence
  Synthetic polynucleotide
ctaatacgactcactatagcaccagtttaccttcaacataccatgccggacgttggtggtctcactgaccaccaacgtccggctcactcggacgttggtggtcacctaatatcctccttaccttcaacttgaggatacatactggtgagc

SEQ ID NO: 357 - DNA, 150 bp, Artificial Sequence
  Synthetic polynucleotide
ctaatacgactcactatagcaccagtttaccttcaacataccatgtcggacgttggtggtctcactgaccaccaacgtccgactcactcggacgttggtggtcacctaatatcctccttaccttcaacttgaggatacatactggtgagc

SEQ ID NO: 358 - DNA, 150 bp, Artificial Sequence
  Synthetic polynucleotide
ctaatacgactcactatagcaccagtttaccttcaacataccatcacggacgttggtggtctcactgaccaccaacgtccgtgtcactcggacgttggtggtcacctaatatcctccttaccttcaacttgaggatacatactggtgagc

SEQ ID NO: 359 - DNA, 150 bp, Artificial Sequence
  Synthetic polynucleotide
ctaatacgactcactatagcaccagtttaccttcaacataccatcgcggacgttggtggtctcactgaccaccaacgtccgcgtcactcggacgttggtggtcacctaatatcctccttaccttcaacttgaggatacatactggtgagc

SEQ ID NO: 360 - DNA, 150 bp, Artificial Sequence
  Synthetic polynucleotide
ctaatacgactcactatagcaccagtttaccttcaacataccatcccggacgttggtggtctcactgaccaccaacgtccgggtcactcggacgttggtggtcacctaatatcctccttaccttcaacttgaggatacatactggtgagc

SEQ ID NO: 361 - DNA, 150 bp, Artificial Sequence
  Synthetic polynucleotide
ctaatacgactcactatagcaccagtttaccttcaacataccatctcggacgttggtggtctcactgaccaccaacgtccgagtcactcggacgttggtggtcacctaatatcctccttaccttcaacttgaggatacatactggtgagc

SEQ ID NO: 362 - DNA, 150 bp, Artificial Sequence
  Synthetic polynucleotide
ctaatacgactcactatagcaccagtttaccttcaacataccattacggacgttggtggtctcactgaccaccaacgtccgtatcactcggacgttggtggtcacctaatatcctccttaccttcaacttgaggatacatactggtgagc

SEQ ID NO: 363 - DNA, 150 bp, Artificial Sequence
  Synthetic polynucleotide
ctaatacgactcactatagcaccagtttaccttcaacataccattgcggacgttggtggtctcactgaccaccaacgtccgcatcactcggacgttggtggtcacctaatatcctccttaccttcaacttgaggatacatactggtgagc

SEQ ID NO: 364 - DNA, 150 bp, Artificial Sequence
  Synthetic polynucleotide
ctaatacgactcactatagcaccagtttaccttcaacataccattccggacgttggtggtctcactgaccaccaacgtccggatcactcggacgttggtggtcacctaatatcctccttaccttcaacttgaggatacatactggtgagc

SEQ ID NO: 365 - DNA, 150 bp, Artificial Sequence
  Synthetic polynucleotide
ctaatacgactcactatagcaccagtttaccttcaacataccatttcggacgttggtggtctcactgaccaccaacgtccgaatcactcggacgttggtggtcacctaatatcctccttaccttcaacttgaggatacatactggtgagc

SEQ ID NO: 366 - DNA, 150 bp, Artificial Sequence
  Synthetic polynucleotide
ctaatacgactcactatagcaccagtactaccacttattcctctaacgaggcggccttacgtcactcgtaaggccgcctcgtttcactcgaggcggccttacgtccacatcaccactacaacaattacttgaggatacatactggtgagc

SEQ ID NO: 367 - DNA, 150 bp, Artificial Sequence
  Synthetic polynucleotide
ctaatacgactcactatagcaccagtactaccacttattcctctagcgaggcggccttacgtcactcgtaaggccgcctcgcttcactcgaggcggccttacgtccacatcaccactacaacaattacttgaggatacatactggtgagc

SEQ ID NO: 368 - DNA, 150 bp, Artificial Sequence
  Synthetic polynucleotide
ctaatacgactcactatagcaccagtactaccacttattcctctaccgaggcggccttacgtcactcgtaaggccgcctcggttcactcgaggcggccttacgtccacatcaccactacaacaattacttgaggatacatactggtgagc

SEQ ID NO: 369 - DNA, 150 bp, Artificial Sequence
  Synthetic polynucleotide
ctaatacgactcactatagcaccagtactaccacttattcctctatcgaggcggccttacgtcactcgtaaggccgcctcgattcactcgaggcggccttacgtccacatcaccactacaacaattacttgaggatacatactggtgagc

SEQ ID NO: 370 - DNA, 150 bp, Artificial Sequence
  Synthetic polynucleotide
ctaatacgactcactatagcaccagtactaccacttattcctctgacgaggcggccttacgtcactcgtaaggccgcctcgtctcactcgaggcggccttacgtccacatcaccactacaacaattacttgaggatacatactggtgagc

SEQ ID NO: 371 - DNA, 150 bp, Artificial Sequence
  Synthetic polynucleotide
ctaatacgactcactatagcaccagtactaccacttattcctctggcgaggcggccttacgtcactcgtaaggccgcctcgcctcactcgaggcggccttacgtccacatcaccactacaacaattacttgaggatacatactggtgagc

SEQ ID NO: 372 - DNA, 150 bp, Artificial Sequence
  Synthetic polynucleotide
ctaatacgactcactatagcaccagtactaccacttattcctctgccgaggcggccttacgtcactcgtaaggccgcctcggctcactcgaggcggccttacgtccacatcaccactacaacaattacttgaggatacatactggtgagc

SEQ ID NO: 373 - DNA, 150 bp, Artificial Sequence
  Synthetic polynucleotide
ctaatacgactcactatagcaccagtactaccacttattcctctgtcgaggcggccttacgtcactcgtaaggccgcctcgactcactcgaggcggccttacgtccacatcaccactacaacaattacttgaggatacatactggtgagc

SEQ ID NO: 374 - DNA, 150 bp, Artificial Sequence
  Synthetic polynucleotide
ctaatacgactcactatagcaccagtactaccacttattcctctcacgaggcggccttacgtcactcgtaaggccgcctcgtgtcactcgaggcggccttacgtccacatcaccactacaacaattacttgaggatacatactggtgagc

SEQ ID NO: 375 - DNA, 150 bp, Artificial Sequence
  Synthetic polynucleotide
ctaatacgactcactatagcaccagtactaccacttattcctctcgcgaggcggccttacgtcactcgtaaggccgcctcgcgtcactcgaggcggccttacgtccacatcaccactacaacaattacttgaggatacatactggtgagc

SEQ ID NO: 376 - DNA, 150 bp, Artificial Sequence
  Synthetic polynucleotide
ctaatacgactcactatagcaccagtactaccacttattcctctcccgaggcggccttacgtcactcgtaaggccgcctcgggtcactcgaggcggccttacgtccacatcaccactacaacaattacttgaggatacatactggtgagc

SEQ ID NO: 377 - DNA, 150 bp, Artificial Sequence
  Synthetic polynucleotide
ctaatacgactcactatagcaccagtactaccacttattcctctctcgaggcggccttacgtcactcgtaaggccgcctcgagtcactcgaggcggccttacgtccacatcaccactacaacaattacttgaggatacatactggtgagc

SEQ ID NO: 378 - DNA, 150 bp, Artificial Sequence
  Synthetic polynucleotide
ctaatacgactcactatagcaccagtactaccacttattcctcttacgaggcggccttacgtcactcgtaaggccgcctcgtatcactcgaggcggccttacgtccacatcaccactacaacaattacttgaggatacatactggtgagc

SEQ ID NO: 379 - DNA, 150 bp, Artificial Sequence
  Synthetic polynucleotide
ctaatacgactcactatagcaccagtactaccacttattcctcttgcgaggcggccttacgtcactcgtaaggccgcctcgcatcactcgaggcggccttacgtccacatcaccactacaacaattacttgaggatacatactggtgagc

SEQ ID NO: 380 - DNA, 150 bp, Artificial Sequence
  Synthetic polynucleotide
ctaatacgactcactatagcaccagtactaccacttattcctcttccgaggcggccttacgtcactcgtaaggccgcctcggatcactcgaggcggccttacgtccacatcaccactacaacaattacttgaggatacatactggtgagc

SEQ ID NO: 381 - DNA, 150 bp, Artificial Sequence
  Synthetic polynucleotide
ctaatacgactcactatagcaccagtactaccacttattcctctttcgaggcggccttacgtcactcgtaaggccgcctcgaatcactcgaggcggccttacgtccacatcaccactacaacaattacttgaggatacatactggtgagc

SEQ ID NO: 382 - DNA, 150 bp, Artificial Sequence
  Synthetic polynucleotide
gtaatacgactcactatagctcacctcttcaacatccgtacgaagcaacctctataattccaccgaatctgctctcgccatacctatcggtggaattatagaggttgcttcgtacgaacacaactctgaagtggatactgtcgatggtac

SEQ ID NO: 383 - DNA, 150 bp, Artificial Sequence
  Synthetic polynucleotide
gtaatacgactcactatagctcacctcttcaacatccgtacgaagcgaacctctataattccaccgaatctgctctcgccatacctatcggtggaattatagaggttgcttcgtacgaacacaacttgaagtggatactgtcgatggtac

SEQ ID NO: 384 - DNA, 150 bp, Artificial Sequence
  Synthetic polynucleotide
gtaatacgactcactatagctcacctcttcaacatccgtacgaagccaacctctataattccaccgaatctgctctcgccatacctatcggtggaattatagaggttgcttcgtacgaacacaacttgaagtggatactgtcgatggtac

SEQ ID NO: 385 - DNA, 150 bp, Artificial Sequence
  Synthetic polynucleotide
gtaatacgactcactatagctcacctcttcaacatccgtacgaagcgagaacctctataattccaccgaatctgctctcgccatacctatcggtggaattatagaggttgcttcgtacgaacacaatgaagtggatactgtcgatggtac

SEQ ID NO: 386 - DNA, 150 bp, Artificial Sequence
  Synthetic polynucleotide
gtaatacgactcactatagctcacctcttcaacatccgtacgaagccgcaacctctataattccaccgaatctgctctcgccatacctatcggtggaattatagaggttgcttcgtacgaacacaatgaagtggatactgtcgatggtac

SEQ ID NO: 387 - DNA, 150 bp, Artificial Sequence
  Synthetic polynucleotide
gtaatacgactcactatagctcacctcttcaacatccgtacgaagctacctctataattccaccgaatctgctctcgccatacctatcggtggaattatagaggttgcttcgtacgaacacaactctgaagtggatactgtcgatggtac

SEQ ID NO: 388 - DNA, 150 bp, Artificial Sequence
  Synthetic polynucleotide
gtaatacgactcactatagctcacctcttcaacatccgtacgaaggttcctctataattccaccgaatctgctctcgccatacctatcggtggaattatagaggttgcttcgtacgaacacaactctgaagtggatactgtcgatggtac

SEQ ID NO: 389 - DNA, 150 bp, Artificial Sequence
  Synthetic polynucleotide
gtaatacgactcactatagctcacctcttcaacatccgtacgaaggttcctctataattccaccgaatctgctctcgccatacctatcggtggaattatagaggttggcttcgtacgaacacaacttgaagtggatactgtcgatggtac

SEQ ID NO: 390 - DNA, 150 bp, Artificial Sequence
  Synthetic polynucleotide
gtaatacgactcactatagctcacctcttcaacatccgtacgaaggttcctctataattccaccgaatctgctctcgccatacctatcggtggaattatagaggtctgcttcgtacgaacacaacttgaagtggatactgtcgatggtac

SEQ ID NO: 391 - DNA, 150 bp, Artificial Sequence
  Synthetic polynucleotide
gtaatacgactcactatagctcacctcttcaacatccgtacgaagcaacctctatagattccaccgaatctgctctcgccatacctatcggtggaattatagaggttgcttcgtacgaacacaacttgaagtggatactgtcgatggtac

SEQ ID NO: 392 - DNA, 150 bp, Artificial Sequence
  Synthetic polynucleotide
gtaatacgactcactatagctcacctcttcaacatccgtacgaagcaacctctatacattccaccgaatctgctctcgccatacctatcggtggaattatagaggttgcttcgtacgaacacaacttgaagtggatactgtcgatggtac

SEQ ID NO: 393 - DNA, 150 bp, Artificial Sequence
  Synthetic polynucleotide
gtaatacgactcactatagctcacctcttcaacatccgtacgaagcaacctctatagagattccaccgaatctgctctcgccatacctatcggtggaattatagaggttgcttcgtacgaacacaatgaagtggatactgtcgatggtac

SEQ ID NO: 394 - DNA, 150 bp, Artificial Sequence
  Synthetic polynucleotide
gtaatacgactcactatagctcacctcttcaacatccgtacgaagcaacctctatacgcattccaccgaatctgctctcgccatacctatcggtggaattatagaggttgcttcgtacgaacacaatgaagtggatactgtcgatggtac

SEQ ID NO: 395 - DNA, 150 bp, Artificial Sequence
  Synthetic polynucleotide
gtaatacgactcactatagctcacctcttcaacatccgtacgaagcaacctctatatttccaccgaatctgctctcgccatacctatcggtggaattatagaggttgcttcgtacgaacacaactctgaagtggatactgtcgatggtac

SEQ ID NO: 396 - DNA, 150 bp, Artificial Sequence
  Synthetic polynucleotide
gtaatacgactcactatagctcacctcttcaacatccgtacgaagcaacctctatttatccaccgaatctgctctcgccatacctatcggtggaattatagaggttgcttcgtacgaacacaactctgaagtggatactgtcgatggtac

SEQ ID NO: 397 - DNA, 150 bp, Artificial Sequence
  Synthetic polynucleotide
gtaatacgactcactatagctcacctcttcaacatccgtacgaagcaacctctatttatccaccgaatctgctctcgccatacctatcggtggaattgatagaggttgcttcgtacgaacacaacttgaagtggatactgtcgatggtac

SEQ ID NO: 398 - DNA, 150 bp, Artificial Sequence
  Synthetic polynucleotide
gtaatacgactcactatagctcacctcttcaacatccgtacgaagcaacctctatttatccaccgaatctgctctcgccatacctatcggtggaacttatagaggttgcttcgtacgaacacaacttgaagtggatactgtcgatggtac

SEQ ID NO: 399 - DNA, 150 bp, Artificial Sequence
  Synthetic polynucleotide
gtaatacgactcactatagctcacctcttcaacatccgtacgaagcgaacctctatagattccaccgaatctgctctcgccatacctatcggtggaattatagaggttgcttcgtacgaacacaactgaagtggatactgtcgatggtac

SEQ ID NO: 400 - DNA, 150 bp, Artificial Sequence
  Synthetic polynucleotide
gtaatacgactcactatagctcacctcttcaacatccgtacgaagccaacctctatacattccaccgaatctgctctcgccatacctatcggtggaattatagaggttgcttcgtacgaacacaactgaagtggatactgtcgatggtac

SEQ ID NO: 401 - DNA, 150 bp, Artificial Sequence
  Synthetic polynucleotide
gtaatacgactcactatagctcacctcttcaacatccgtacgaagcgagaacctctatagagattccaccgaatctgctctcgccatacctatcggtggaattatagaggttgcttcgtacgaacatgaagtggatactgtcgatggtac

SEQ ID NO: 402 - DNA, 150 bp, Artificial Sequence
  Synthetic polynucleotide
gtaatacgactcactatagctcacctcttcaacatccgtacgaagccgcaacctctatacgcattccaccgaatctgctctcgccatacctatcggtggaattatagaggttgcttcgtacgaacatgaagtggatactgtcgatggtac

SEQ ID NO: 403 - DNA, 150 bp, Artificial Sequence
  Synthetic polynucleotide
gtaatacgactcactatagctcacctcttcaacatccgtacgaagctacctctatatttccaccgaatctgctctcgccatacctatcggtggaattatagaggttgcttcgtacgaacacaactctgaagtggatactgtcgatggtac

SEQ ID NO: 404 - DNA, 150 bp, Artificial Sequence
  Synthetic polynucleotide
gtaatacgactcactatagctcacctcttcaacatccgtacgaaggttcctctatttatccaccgaatctgctctcgccatacctatcggtggaattatagaggttgcttcgtacgaacacaactctgaagtggatactgtcgatggtac

SEQ ID NO: 405 - DNA, 150 bp, Artificial Sequence
  Synthetic polynucleotide
gtaatacgactcactatagctcacctcttcaacatccgtacgaaggttcctctatttatccaccgaatctgctctcgccatacctatcggtggaattgatagaggttggcttcgtacgaacacaactgaagtggatactgtcgatggtac

SEQ ID NO: 406 - DNA, 150 bp, Artificial Sequence
  Synthetic polynucleotide
gtaatacgactcactatagctcacctcttcaacatccgtacgaaggttcctctatttatccaccgaatctgctctcgccatacctatcggtggaattcatagaggttgccttcgtacgaacacaactgaagtggatactgtcgatggtac

SEQ ID NO: 407 - DNA, 150 bp, Artificial Sequence
  Synthetic polynucleotide
gtaatacgactcactatagctcacctcttcaacatccaatgacaccttcacgcaggaatccgtcgcatctgctctcgccatacctagcgacggattcctgcgtgaaggtgtcattgaacacaactctgaagtggatactgtcgatggtac

SEQ ID NO: 408 - DNA, 150 bp, Artificial Sequence
  Synthetic polynucleotide
gtaatacgactcactatagctcacctcttcaacatccaatgacaccgttcacgcaggaatccgtcgcatctgctctcgccatacctagcgacggattcctgcgtgaaggtgtcattgaacacaacttgaagtggatactgtcgatggtac

SEQ ID NO: 409 - DNA, 150 bp, Artificial Sequence
  Synthetic polynucleotide
gtaatacgactcactatagctcacctcttcaacatccaatgacacccttcacgcaggaatccgtcgcatctgctctcgccatacctagcgacggattcctgcgtgaaggtgtcattgaacacaacttgaagtggatactgtcgatggtac

SEQ ID NO: 410 - DNA, 150 bp, Artificial Sequence
  Synthetic polynucleotide
gtaatacgactcactatagctcacctcttcaacatccaatgacaccgagttcacgcaggaatccgtcgcatctgctctcgccatacctagcgacggattcctgcgtgaaggtgtcattgaacacaatgaagtggatactgtcgatggtac

SEQ ID NO: 411 - DNA, 150 bp, Artificial Sequence
  Synthetic polynucleotide
gtaatacgactcactatagctcacctcttcaacatccaatgacacccgcttcacgcaggaatccgtcgcatctgctctcgccatacctagcgacggattcctgcgtgaaggtgtcattgaacacaatgaagtggatactgtcgatggtac

SEQ ID NO: 412 - DNA, 150 bp, Artificial Sequence
  Synthetic polynucleotide
gtaatacgactcactatagctcacctcttcaacatccaatgacaccatcacgcaggaatccgtcgcatctgctctcgccatacctagcgacggattcctgcgtgaaggtgtcattgaacacaactctgaagtggatactgtcgatggtac

SEQ ID NO: 413 - DNA, 150 bp, Artificial Sequence
  Synthetic polynucleotide
gtaatacgactcactatagctcacctcttcaacatccaatgacacgaacacgcaggaatccgtcgcatctgctctcgccatacctagcgacggattcctgcgtgaaggtgtcattgaacacaactctgaagtggatactgtcgatggtac

SEQ ID NO: 414 - DNA, 150 bp, Artificial Sequence
  Synthetic polynucleotide
gtaatacgactcactatagctcacctcttcaacatccaatgacacgaacacgcaggaatccgtcgcatctgctctcgccatacctagcgacggattcctgcgtgaagggtgtcattgaacacaacttgaagtggatactgtcgatggtac

SEQ ID NO: 415 - DNA, 150 bp, Artificial Sequence
  Synthetic polynucleotide
gtaatacgactcactatagctcacctcttcaacatccaatgacacgaacacgcaggaatccgtcgcatctgctctcgccatacctagcgacggattcctgcgtgacaggtgtcattgaacacaacttgaagtggatactgtcgatggtac

SEQ ID NO: 416 - DNA, 150 bp, Artificial Sequence
  Synthetic polynucleotide
gtaatacgactcactatagctcacctcttcaacatccaatgacaccttcacgcagggaatccgtcgcatctgctctcgccatacctagcgacggattcctgcgtgaaggtgtcattgaacacaacttgaagtggatactgtcgatggtac

SEQ ID NO: 417 - DNA, 150 bp, Artificial Sequence
  Synthetic polynucleotide
gtaatacgactcactatagctcacctcttcaacatccaatgacaccttcacgcaggcaatccgtcgcatctgctctcgccatacctagcgacggattcctgcgtgaaggtgtcattgaacacaacttgaagtggatactgtcgatggtac

SEQ ID NO: 418 - DNA, 150 bp, Artificial Sequence
  Synthetic polynucleotide
gtaatacgactcactatagctcacctcttcaacatccaatgacaccttcacgcagggagaatccgtcgcatctgctctcgccatacctagcgacggattcctgcgtgaaggtgtcattgaacacaatgaagtggatactgtcgatggtac

SEQ ID NO: 419 - DNA, 150 bp, Artificial Sequence
  Synthetic polynucleotide
gtaatacgactcactatagctcacctcttcaacatccaatgacaccttcacgcaggcgcaatccgtcgcatctgctctcgccatacctagcgacggattcctgcgtgaaggtgtcattgaacacaatgaagtggatactgtcgatggtac

SEQ ID NO: 420 - DNA, 150 bp, Artificial Sequence
  Synthetic polynucleotide
gtaatacgactcactatagctcacctcttcaacatccaatgacaccttcacgcaggtatccgtcgcatctgctctcgccatacctagcgacggattcctgcgtgaaggtgtcattgaacacaactctgaagtggatactgtcgatggtac

SEQ ID NO: 421 - DNA, 150 bp, Artificial Sequence
  Synthetic polynucleotide
gtaatacgactcactatagctcacctcttcaacatccaatgacaccttcacgcagctttccgtcgcatctgctctcgccatacctagcgacggattcctgcgtgaaggtgtcattgaacacaactctgaagtggatactgtcgatggtac

SEQ ID NO: 422 - DNA, 150 bp, Artificial Sequence
  Synthetic polynucleotide
gtaatacgactcactatagctcacctcttcaacatccaatgacaccttcacgcagctttccgtcgcatctgctctcgccatacctagcgacggattcgctgcgtgaaggtgtcattgaacacaacttgaagtggatactgtcgatggtac

SEQ ID NO: 423 - DNA, 150 bp, Artificial Sequence
  Synthetic polynucleotide
gtaatacgactcactatagctcacctcttcaacatccaatgacaccttcacgcagctttccgtcgcatctgctctcgccatacctagcgacggatctcctgcgtgaaggtgtcattgaacacaacttgaagtggatactgtcgatggtac

SEQ ID NO: 424 - DNA, 150 bp, Artificial Sequence
  Synthetic polynucleotide
gtaatacgactcactatagctcacctcttcaacatccaatgacaccgttcacgcagggaatccgtcgcatctgctctcgccatacctagcgacggattcctgcgtgaaggtgtcattgaacacaactgaagtggatactgtcgatggtac

SEQ ID NO: 425 - DNA, 150 bp, Artificial Sequence
  Synthetic polynucleotide
gtaatacgactcactatagctcacctcttcaacatccaatgacacccttcacgcaggcaatccgtcgcatctgctctcgccatacctagcgacggattcctgcgtgaaggtgtcattgaacacaactgaagtggatactgtcgatggtac

SEQ ID NO: 426 - DNA, 150 bp, Artificial Sequence
  Synthetic polynucleotide
gtaatacgactcactatagctcacctcttcaacatccaatgacaccgagttcacgcagggagaatccgtcgcatctgctctcgccatacctagcgacggattcctgcgtgaaggtgtcattgaacatgaagtggatactgtcgatggtac

SEQ ID NO: 427 - DNA, 150 bp, Artificial Sequence
  Synthetic polynucleotide
gtaatacgactcactatagctcacctcttcaacatccaatgacacccgcttcacgcaggcgcaatccgtcgcatctgctctcgccatacctagcgacggattcctgcgtgaaggtgtcattgaacatgaagtggatactgtcgatggtac

SEQ ID NO: 428 - DNA, 150 bp, Artificial Sequence
  Synthetic polynucleotide
gtaatacgactcactatagctcacctcttcaacatccaatgacaccatcacgcaggtatccgtcgcatctgctctcgccatacctagcgacggattcctgcgtgaaggtgtcattgaacacaactctgaagtggatactgtcgatggtac

SEQ ID NO: 429 - DNA, 150 bp, Artificial Sequence
  Synthetic polynucleotide
gtaatacgactcactatagctcacctcttcaacatccaatgacacgaacacgcagctttccgtcgcatctgctctcgccatacctagcgacggattcctgcgtgaaggtgtcattgaacacaactctgaagtggatactgtcgatggtac

SEQ ID NO: 430 - DNA, 150 bp, Artificial Sequence
  Synthetic polynucleotide
gtaatacgactcactatagctcacctcttcaacatccaatgacacgaacacgcagctttccgtcgcatctgctctcgccatacctagcgacggattcgctgcgtgaagggtgtcattgaacacaactgaagtggatactgtcgatggtac

SEQ ID NO: 431 - DNA, 150 bp, Artificial Sequence
  Synthetic polynucleotide
gtaatacgactcactatagctcacctcttcaacatccaatgacacgaacacgcagctttccgtcgcatctgctctcgccatacctagcgacggattccctgcgtgaagcgtgtcattgaacacaactgaagtggatactgtcgatggtac

SEQ ID NO: 432 - DNA, 150 bp, Artificial Sequence
  Synthetic polynucleotide
gtaatacgactcactatagctcacctcttcaacatcttccgcgcagaggcggtcatcatggcaccgatctgctctcgccatacctacggtgccatgatgaccgcctctgcgcggaaaacacaactctgaagtggatactgtcgatggtac

SEQ ID NO: 433 - DNA, 150 bp, Artificial Sequence
  Synthetic polynucleotide
gtaatacgactcactatagctcacctcttcaacatcttccgcgcaggaggcggtcatcatggcaccgatctgctctcgccatacctacggtgccatgatgaccgcctctgcgcggaaaacacaacttgaagtggatactgtcgatggtac

SEQ ID NO: 434 - DNA, 150 bp, Artificial Sequence
  Synthetic polynucleotide
gtaatacgactcactatagctcacctcttcaacatcttccgcgcagcaggcggtcatcatggcaccgatctgctctcgccatacctacggtgccatgatgaccgcctctgcgcggaaaacacaacttgaagtggatactgtcgatggtac

SEQ ID NO: 435 - DNA, 150 bp, Artificial Sequence
  Synthetic polynucleotide
gtaatacgactcactatagctcacctcttcaacatcttccgcgcaggagaggcggtcatcatggcaccgatctgctctcgccatacctacggtgccatgatgaccgcctctgcgcggaaaacacaatgaagtggatactgtcgatggtac

SEQ ID NO: 436 - DNA, 150 bp, Artificial Sequence
  Synthetic polynucleotide
gtaatacgactcactatagctcacctcttcaacatcttccgcgcagcgcaggcggtcatcatggcaccgatctgctctcgccatacctacggtgccatgatgaccgcctctgcgcggaaaacacaatgaagtggatactgtcgatggtac

SEQ ID NO: 437 - DNA, 150 bp, Artificial Sequence
  Synthetic polynucleotide
gtaatacgactcactatagctcacctcttcaacatcttccgcgcagtggcggtcatcatggcaccgatctgctctcgccatacctacggtgccatgatgaccgcctctgcgcggaaaacacaactctgaagtggatactgtcgatggtac

SEQ ID NO: 438 - DNA, 150 bp, Artificial Sequence
  Synthetic polynucleotide
gtaatacgactcactatagctcacctcttcaacatcttccgcgcactcgcggtcatcatggcaccgatctgctctcgccatacctacggtgccatgatgaccgcctctgcgcggaaaacacaactctgaagtggatactgtcgatggtac

SEQ ID NO: 439 - DNA, 150 bp, Artificial Sequence
  Synthetic polynucleotide
gtaatacgactcactatagctcacctcttcaacatcttccgcgcactcgcggtcatcatggcaccgatctgctctcgccatacctacggtgccatgatgaccgcctcgtgcgcggaaaacacaacttgaagtggatactgtcgatggtac

SEQ ID NO: 440 - DNA, 150 bp, Artificial Sequence
  Synthetic polynucleotide
gtaatacgactcactatagctcacctcttcaacatcttccgcgcactcgcggtcatcatggcaccgatctgctctcgccatacctacggtgccatgatgaccgccctctgcgcggaaaacacaacttgaagtggatactgtcgatggtac

SEQ ID NO: 441 - DNA, 150 bp, Artificial Sequence
  Synthetic polynucleotide
gtaatacgactcactatagctcacctcttcaacatcttccgcgcagaggcggtcatgcatggcaccgatctgctctcgccatacctacggtgccatgatgaccgcctctgcgcggaaaacacaacttgaagtggatactgtcgatggtac

SEQ ID NO: 442 - DNA, 150 bp, Artificial Sequence
  Synthetic polynucleotide
gtaatacgactcactatagctcacctcttcaacatcttccgcgcagaggcggtcatccatggcaccgatctgctctcgccatacctacggtgccatgatgaccgcctctgcgcggaaaacacaacttgaagtggatactgtcgatggtac

SEQ ID NO: 443 - DNA, 150 bp, Artificial Sequence
  Synthetic polynucleotide
gtaatacgactcactatagctcacctcttcaacatcttccgcgcagaggcggtcatgagcatggcaccgatctgctctcgccatacctacggtgccatgatgaccgcctctgcgcggaaaacacaatgaagtggatactgtcgatggtac

SEQ ID NO: 444 - DNA, 150 bp, Artificial Sequence
  Synthetic polynucleotide
gtaatacgactcactatagctcacctcttcaacatcttccgcgcagaggcggtcatcgccatggcaccgatctgctctcgccatacctacggtgccatgatgaccgcctctgcgcggaaaacacaatgaagtggatactgtcgatggtac

SEQ ID NO: 445 - DNA, 150 bp, Artificial Sequence
  Synthetic polynucleotide
gtaatacgactcactatagctcacctcttcaacatcttccgcgcagaggcggtcatgatggcaccgatctgctctcgccatacctacggtgccatgatgaccgcctctgcgcggaaaacacaactctgaagtggatactgtcgatggtac

SEQ ID NO: 446 - DNA, 150 bp, Artificial Sequence
  Synthetic polynucleotide
gtaatacgactcactatagctcacctcttcaacatcttccgcgcagaggcggtcaagttggcaccgatctgctctcgccatacctacggtgccatgatgaccgcctctgcgcggaaaacacaactctgaagtggatactgtcgatggtac

SEQ ID NO: 447 - DNA, 150 bp, Artificial Sequence
  Synthetic polynucleotide
gtaatacgactcactatagctcacctcttcaacatcttccgcgcagaggcggtcaagttggcaccgatctgctctcgccatacctacggtgccatgagtgaccgcctctgcgcggaaaacacaacttgaagtggatactgtcgatggtac

SEQ ID NO: 448 - DNA, 150 bp, Artificial Sequence
  Synthetic polynucleotide
gtaatacgactcactatagctcacctcttcaacatcttccgcgcagaggcggtcaagttggcaccgatctgctctcgccatacctacggtgccatcgatgaccgcctctgcgcggaaaacacaacttgaagtggatactgtcgatggtac

SEQ ID NO: 449 - DNA, 150 bp, Artificial Sequence
  Synthetic polynucleotide
gtaatacgactcactatagctcacctcttcaacatcttccgcgcaggaggcggtcatgcatggcaccgatctgctctcgccatacctacggtgccatgatgaccgcctctgcgcggaaaacacaactgaagtggatactgtcgatggtac

SEQ ID NO: 450 - DNA, 150 bp, Artificial Sequence
  Synthetic polynucleotide
gtaatacgactcactatagctcacctcttcaacatcttccgcgcagcaggcggtcatccatggcaccgatctgctctcgccatacctacggtgccatgatgaccgcctctgcgcggaaaacacaactgaagtggatactgtcgatggtac

SEQ ID NO: 451 - DNA, 150 bp, Artificial Sequence
  Synthetic polynucleotide
gtaatacgactcactatagctcacctcttcaacatcttccgcgcaggagaggcggtcatgagcatggcaccgatctgctctcgccatacctacggtgccatgatgaccgcctctgcgcggaaaacatgaagtggatactgtcgatggtac

SEQ ID NO: 452 - DNA, 150 bp, Artificial Sequence
  Synthetic polynucleotide
gtaatacgactcactatagctcacctcttcaacatcttccgcgcagcgcaggcggtcatcgccatggcaccgatctgctctcgccatacctacggtgccatgatgaccgcctctgcgcggaaaacatgaagtggatactgtcgatggtac

SEQ ID NO: 453 - DNA, 150 bp, Artificial Sequence
  Synthetic polynucleotide
gtaatacgactcactatagctcacctcttcaacatcttccgcgcagtggcggtcatgatggcaccgatctgctctcgccatacctacggtgccatgatgaccgcctctgcgcggaaaacacaactctgaagtggatactgtcgatggtac

SEQ ID NO: 454 - DNA, 150 bp, Artificial Sequence
  Synthetic polynucleotide
gtaatacgactcactatagctcacctcttcaacatcttccgcgcactcgcggtcaagttggcaccgatctgctctcgccatacctacggtgccatgatgaccgcctctgcgcggaaaacacaactctgaagtggatactgtcgatggtac

SEQ ID NO: 455 - DNA, 150 bp, Artificial Sequence
  Synthetic polynucleotide
gtaatacgactcactatagctcacctcttcaacatcttccgcgcactcgcggtcaagttggcaccgatctgctctcgccatacctacggtgccatgagtgaccgcctcgtgcgcggaaaacacaactgaagtggatactgtcgatggtac

SEQ ID NO: 456 - DNA, 150 bp, Artificial Sequence
  Synthetic polynucleotide
gtaatacgactcactatagctcacctcttcaacatcttccgcgcactcgcggtcaagttggcaccgatctgctctcgccatacctacggtgccatgactgaccgcctcctgcgcggaaaacacaactgaagtggatactgtcgatggtac

SEQ ID NO: 457 - DNA, 150 bp, Artificial Sequence
  Synthetic polynucleotide
gtaatacgactcactatagctcacctcttcaacatcgccgcgctggctagcgtgcttccagcggtcatctgctctcgccatacctagaccgctggaagcacgctagccagcgcggcaacacaactctgaagtggatactgtcgatggtac

SEQ ID NO: 458 - DNA, 150 bp, Artificial Sequence
  Synthetic polynucleotide
gtaatacgactcactatagctcacctcttcaacatcgccgcgctgggctagcgtgcttccagcggtcatctgctctcgccatacctagaccgctggaagcacgctagccagcgcggcaacacaacttgaagtggatactgtcgatggtac

SEQ ID NO: 459 - DNA, 150 bp, Artificial Sequence
  Synthetic polynucleotide
gtaatacgactcactatagctcacctcttcaacatcgccgcgctggcctagcgtgcttccagcggtcatctgctctcgccatacctagaccgctggaagcacgctagccagcgcggcaacacaacttgaagtggatactgtcgatggtac

SEQ ID NO: 460 - DNA, 150 bp, Artificial Sequence
  Synthetic polynucleotide
gtaatacgactcactatagctcacctcttcaacatcgccgcgctgggagctagcgtgcttccagcggtcatctgctctcgccatacctagaccgctggaagcacgctagccagcgcggcaacacaatgaagtggatactgtcgatggtac

SEQ ID NO: 461 - DNA, 150 bp, Artificial Sequence
  Synthetic polynucleotide
gtaatacgactcactatagctcacctcttcaacatcgccgcgctggcgcctagcgtgcttccagcggtcatctgctctcgccatacctagaccgctggaagcacgctagccagcgcggcaacacaatgaagtggatactgtcgatggtac

SEQ ID NO: 462 - DNA, 150 bp, Artificial Sequence
  Synthetic polynucleotide
gtaatacgactcactatagctcacctcttcaacatcgccgcgctgggtagcgtgcttccagcggtcatctgctctcgccatacctagaccgctggaagcacgctagccagcgcggcaacacaactctgaagtggatactgtcgatggtac

SEQ ID NO: 463 - DNA, 150 bp, Artificial Sequence
  Synthetic polynucleotide
gtaatacgactcactatagctcacctcttcaacatcgccgcgctgcgaagcgtgcttccagcggtcatctgctctcgccatacctagaccgctggaagcacgctagccagcgcggcaacacaactctgaagtggatactgtcgatggtac

SEQ ID NO: 464 - DNA, 150 bp, Artificial Sequence
  Synthetic polynucleotide
gtaatacgactcactatagctcacctcttcaacatcgccgcgctgcgaagcgtgcttccagcggtcatctgctctcgccatacctagaccgctggaagcacgctagcgcagcgcggcaacacaacttgaagtggatactgtcgatggtac

SEQ ID NO: 465 - DNA, 150 bp, Artificial Sequence
  Synthetic polynucleotide
gtaatacgactcactatagctcacctcttcaacatcgccgcgctgcgaagcgtgcttccagcggtcatctgctctcgccatacctagaccgctggaagcacgctacgccagcgcggcaacacaacttgaagtggatactgtcgatggtac

SEQ ID NO: 466 - DNA, 150 bp, Artificial Sequence
  Synthetic polynucleotide
gtaatacgactcactatagctcacctcttcaacatcgccgcgctggctagcgtgctgtccagcggtcatctgctctcgccatacctagaccgctggaagcacgctagccagcgcggcaacacaacttgaagtggatactgtcgatggtac

SEQ ID NO: 467 - DNA, 150 bp, Artificial Sequence
  Synthetic polynucleotide
gtaatacgactcactatagctcacctcttcaacatcgccgcgctggctagcgtgctctccagcggtcatctgctctcgccatacctagaccgctggaagcacgctagccagcgcggcaacacaacttgaagtggatactgtcgatggtac

SEQ ID NO: 468 - DNA, 150 bp, Artificial Sequence
  Synthetic polynucleotide
gtaatacgactcactatagctcacctcttcaacatcgccgcgctggctagcgtgctgagtccagcggtcatctgctctcgccatacctagaccgctggaagcacgctagccagcgcggcaacacaatgaagtggatactgtcgatggtac

SEQ ID NO: 469 - DNA, 150 bp, Artificial Sequence
  Synthetic polynucleotide
gtaatacgactcactatagctcacctcttcaacatcgccgcgctggctagcgtgctcgctccagcggtcatctgctctcgccatacctagaccgctggaagcacgctagccagcgcggcaacacaatgaagtggatactgtcgatggtac

SEQ ID NO: 470 - DNA, 150 bp, Artificial Sequence
  Synthetic polynucleotide
gtaatacgactcactatagctcacctcttcaacatcgccgcgctggctagcgtgctaccagcggtcatctgctctcgccatacctagaccgctggaagcacgctagccagcgcggcaacacaactctgaagtggatactgtcgatggtac

SEQ ID NO: 471 - DNA, 150 bp, Artificial Sequence
  Synthetic polynucleotide
gtaatacgactcactatagctcacctcttcaacatcgccgcgctggctagcgtgcaagcagcggtcatctgctctcgccatacctagaccgctggaagcacgctagccagcgcggcaacacaactctgaagtggatactgtcgatggtac

SEQ ID NO: 472 - DNA, 150 bp, Artificial Sequence
  Synthetic polynucleotide
gtaatacgactcactatagctcacctcttcaacatcgccgcgctggctagcgtgcaagcagcggtcatctgctctcgccatacctagaccgctggaaggcacgctagccagcgcggcaacacaacttgaagtggatactgtcgatggtac

SEQ ID NO: 473 - DNA, 150 bp, Artificial Sequence
  Synthetic polynucleotide
gtaatacgactcactatagctcacctcttcaacatcgccgcgctggctagcgtgcaagcagcggtcatctgctctcgccatacctagaccgctggcaagcacgctagccagcgcggcaacacaacttgaagtggatactgtcgatggtac

SEQ ID NO: 474 - DNA, 150 bp, Artificial Sequence
  Synthetic polynucleotide
gtaatacgactcactatagctcacctcttcaacatcgccgcgctgggctagcgtgctgtccagcggtcatctgctctcgccatacctagaccgctggaagcacgctagccagcgcggcaacacaactgaagtggatactgtcgatggtac

SEQ ID NO: 475 - DNA, 150 bp, Artificial Sequence
  Synthetic polynucleotide
gtaatacgactcactatagctcacctcttcaacatcgccgcgctggcctagcgtgctctccagcggtcatctgctctcgccatacctagaccgctggaagcacgctagccagcgcggcaacacaactgaagtggatactgtcgatggtac

SEQ ID NO: 476 - DNA, 150 bp, Artificial Sequence
  Synthetic polynucleotide
gtaatacgactcactatagctcacctcttcaacatcgccgcgctgggagctagcgtgctgagtccagcggtcatctgctctcgccatacctagaccgctggaagcacgctagccagcgcggcaacatgaagtggatactgtcgatggtac

SEQ ID NO: 477 - DNA, 150 bp, Artificial Sequence
  Synthetic polynucleotide
gtaatacgactcactatagctcacctcttcaacatcgccgcgctggcgcctagcgtgctcgctccagcggtcatctgctctcgccatacctagaccgctggaagcacgctagccagcgcggcaacatgaagtggatactgtcgatggtac

SEQ ID NO: 478 - DNA, 150 bp, Artificial Sequence
  Synthetic polynucleotide
gtaatacgactcactatagctcacctcttcaacatcgccgcgctgggtagcgtgctaccagcggtcatctgctctcgccatacctagaccgctggaagcacgctagccagcgcggcaacacaactctgaagtggatactgtcgatggtac

SEQ ID NO: 479 - DNA, 150 bp, Artificial Sequence
  Synthetic polynucleotide
gtaatacgactcactatagctcacctcttcaacatcgccgcgctgcgaagcgtgcaagcagcggtcatctgctctcgccatacctagaccgctggaagcacgctagccagcgcggcaacacaactctgaagtggatactgtcgatggtac

SEQ ID NO: 480 - DNA, 150 bp, Artificial Sequence
  Synthetic polynucleotide
gtaatacgactcactatagctcacctcttcaacatcgccgcgctgcgaagcgtgcaagcagcggtcatctgctctcgccatacctagaccgctggaaggcacgctagcgcagcgcggcaacacaactgaagtggatactgtcgatggtac

SEQ ID NO: 481 - DNA, 150 bp, Artificial Sequence
  Synthetic polynucleotide
gtaatacgactcactatagctcacctcttcaacatcgccgcgctgcgaagcgtgcaagcagcggtcatctgctctcgccatacctagaccgctggaacgcacgctagcccagcgcggcaacacaactgaagtggatactgtcgatggtac

SEQ ID NO: 482 - DNA, 150 bp, Artificial Sequence
  Synthetic polynucleotide
gtaatacgactcactatagctcacctcttcaacatccgtgtccgaggcctggcactggcggccgccatctgctctcgccatacctaggcggccgccagtgccaggcctcggacacgaacacaactctgaagtggatactgtcgatggtac

SEQ ID NO: 483 - DNA, 150 bp, Artificial Sequence
  Synthetic polynucleotide
gtaatacgactcactatagctcacctcttcaacatccgtgtccgagggcctggcactggcggccgccatctgctctcgccatacctaggcggccgccagtgccaggcctcggacacgaacacaacttgaagtggatactgtcgatggtac

SEQ ID NO: 484 - DNA, 150 bp, Artificial Sequence
  Synthetic polynucleotide
gtaatacgactcactatagctcacctcttcaacatccgtgtccgagcgcctggcactggcggccgccatctgctctcgccatacctaggcggccgccagtgccaggcctcggacacgaacacaacttgaagtggatactgtcgatggtac

SEQ ID NO: 485 - DNA, 150 bp, Artificial Sequence
  Synthetic polynucleotide
gtaatacgactcactatagctcacctcttcaacatccgtgtccgaggaggcctggcactggcggccgccatctgctctcgccatacctaggcggccgccagtgccaggcctcggacacgaacacaatgaagtggatactgtcgatggtac

SEQ ID NO: 486 - DNA, 150 bp, Artificial Sequence
  Synthetic polynucleotide
gtaatacgactcactatagctcacctcttcaacatccgtgtccgagcgcgcctggcactggcggccgccatctgctctcgccatacctaggcggccgccagtgccaggcctcggacacgaacacaatgaagtggatactgtcgatggtac

SEQ ID NO: 487 - DNA, 150 bp, Artificial Sequence
  Synthetic polynucleotide
gtaatacgactcactatagctcacctcttcaacatccgtgtccgagccctggcactggcggccgccatctgctctcgccatacctaggcggccgccagtgccaggcctcggacacgaacacaactctgaagtggatactgtcgatggtac

SEQ ID NO: 488 - DNA, 150 bp, Artificial Sequence
  Synthetic polynucleotide
gtaatacgactcactatagctcacctcttcaacatccgtgtccgaccgctggcactggcggccgccatctgctctcgccatacctaggcggccgccagtgccaggcctcggacacgaacacaactctgaagtggatactgtcgatggtac

SEQ ID NO: 489 - DNA, 150 bp, Artificial Sequence
  Synthetic polynucleotide
gtaatacgactcactatagctcacctcttcaacatccgtgtccgaccgctggcactggcggccgccatctgctctcgccatacctaggcggccgccagtgccaggccgtcggacacgaacacaacttgaagtggatactgtcgatggtac

SEQ ID NO: 490 - DNA, 150 bp, Artificial Sequence
  Synthetic polynucleotide
gtaatacgactcactatagctcacctcttcaacatccgtgtccgaccgctggcactggcggccgccatctgctctcgccatacctaggcggccgccagtgccaggccctcggacacgaacacaacttgaagtggatactgtcgatggtac

SEQ ID NO: 491 - DNA, 150 bp, Artificial Sequence
  Synthetic polynucleotide
gtaatacgactcactatagctcacctcttcaacatccgtgtccgaggcctggcactgggcggccgccatctgctctcgccatacctaggcggccgccagtgccaggcctcggacacgaacacaacttgaagtggatactgtcgatggtac

SEQ ID NO: 492 - DNA, 150 bp, Artificial Sequence
  Synthetic polynucleotide
gtaatacgactcactatagctcacctcttcaacatccgtgtccgaggcctggcactcggcggccgccatctgctctcgccatacctaggcggccgccagtgccaggcctcggacacgaacacaacttgaagtggatactgtcgatggtac

SEQ ID NO: 493 - DNA, 150 bp, Artificial Sequence
  Synthetic polynucleotide
gtaatacgactcactatagctcacctcttcaacatccgtgtccgaggcctggcactgagggcggccgccatctgctctcgccatacctaggcggccgccagtgccaggcctcggacacgaacacaatgaagtggatactgtcgatggtac

SEQ ID NO: 494 - DNA, 150 bp, Artificial Sequence
  Synthetic polynucleotide
gtaatacgactcactatagctcacctcttcaacatccgtgtccgaggcctggcactcgcggcggccgccatctgctctcgccatacctaggcggccgccagtgccaggcctcggacacgaacacaatgaagtggatactgtcgatggtac

SEQ ID NO: 495 - DNA, 150 bp, Artificial Sequence
  Synthetic polynucleotide
gtaatacgactcactatagctcacctcttcaacatccgtgtccgaggcctggcactcgcggccgccatctgctctcgccatacctaggcggccgccagtgccaggcctcggacacgaacacaactctgaagtggatactgtcgatggtac

SEQ ID NO: 496 - DNA, 150 bp, Artificial Sequence
  Synthetic polynucleotide
gtaatacgactcactatagctcacctcttcaacatccgtgtccgaggcctggcacacccggccgccatctgctctcgccatacctaggcggccgccagtgccaggcctcggacacgaacacaactctgaagtggatactgtcgatggtac

SEQ ID NO: 497 - DNA, 150 bp, Artificial Sequence
  Synthetic polynucleotide
gtaatacgactcactatagctcacctcttcaacatccgtgtccgaggcctggcacacccggccgccatctgctctcgccatacctaggcggccgccaggtgccaggcctcggacacgaacacaacttgaagtggatactgtcgatggtac

SEQ ID NO: 498 - DNA, 150 bp, Artificial Sequence
  Synthetic polynucleotide
gtaatacgactcactatagctcacctcttcaacatccgtgtccgaggcctggcacacccggccgccatctgctctcgccatacctaggcggccgcccagtgccaggcctcggacacgaacacaacttgaagtggatactgtcgatggtac

SEQ ID NO: 499 - DNA, 150 bp, Artificial Sequence
  Synthetic polynucleotide
gtaatacgactcactatagctcacctcttcaacatccgtgtccgagggcctggcactgggcggccgccatctgctctcgccatacctaggcggccgccagtgccaggcctcggacacgaacacaactgaagtggatactgtcgatggtac

SEQ ID NO: 500 - DNA, 150 bp, Artificial Sequence
  Synthetic polynucleotide
gtaatacgactcactatagctcacctcttcaacatccgtgtccgagcgcctggcactcggcggccgccatctgctctcgccatacctaggcggccgccagtgccaggcctcggacacgaacacaactgaagtggatactgtcgatggtac

SEQ ID NO: 501 - DNA, 150 bp, Artificial Sequence
  Synthetic polynucleotide
gtaatacgactcactatagctcacctcttcaacatccgtgtccgaggaggcctggcactgagggcggccgccatctgctctcgccatacctaggcggccgccagtgccaggcctcggacacgaacatgaagtggatactgtcgatggtac

SEQ ID NO: 502 - DNA, 150 bp, Artificial Sequence
  Synthetic polynucleotide
gtaatacgactcactatagctcacctcttcaacatccgtgtccgagcgcgcctggcactcgcggcggccgccatctgctctcgccatacctaggcggccgccagtgccaggcctcggacacgaacatgaagtggatactgtcgatggtac

SEQ ID NO: 503 - DNA, 150 bp, Artificial Sequence
  Synthetic polynucleotide
gtaatacgactcactatagctcacctcttcaacatccgtgtccgagccctggcactcgcggccgccatctgctctcgccatacctaggcggccgccagtgccaggcctcggacacgaacacaactctgaagtggatactgtcgatggtac

SEQ ID NO: 504 - DNA, 150 bp, Artificial Sequence
  Synthetic polynucleotide
gtaatacgactcactatagctcacctcttcaacatccgtgtccgaccgctggcacacccggccgccatctgctctcgccatacctaggcggccgccagtgccaggcctcggacacgaacacaactctgaagtggatactgtcgatggtac

SEQ ID NO: 505 - DNA, 150 bp, Artificial Sequence
  Synthetic polynucleotide
gtaatacgactcactatagctcacctcttcaacatccgtgtccgaccgctggcacacccggccgccatctgctctcgccatacctaggcggccgccaggtgccaggccgtcggacacgaacacaactgaagtggatactgtcgatggtac

SEQ ID NO: 506 - DNA, 150 bp, Artificial Sequence
  Synthetic polynucleotide
gtaatacgactcactatagctcacctcttcaacatccgtgtccgaccgctggcacacccggccgccatctgctctcgccatacctaggcggccgccacgtgccaggccctcggacacgaacacaactgaagtggatactgtcgatggtac

SEQ ID NO: 507 - DNA, 150 bp, Artificial Sequence
  Synthetic polynucleotide
gtaatacgactcactatagctcacctcatcaatccttcacacaacgtacatcttcgaactttccaaaagttcgctaacagttactccataactgttagaagatgtacgatatctccatcctatccatgaagtggatactgtcgatggtac

SEQ ID NO: 508 - DNA, 150 bp, Artificial Sequence
  Synthetic polynucleotide
gtaatacgactcactatagctcaccttctaacctcctacaatcaatagaattctgttcttcacctagaagaacatggaccatctcccagatggtccatagaattctattcaaccatatccaatcactgaagtggatactgtcgatggtac

SEQ ID NO: 509 - DNA, 150 bp, Artificial Sequence
  Synthetic polynucleotide
gtaatacgactcactatagctcaccttccttcttccaatcttcaaacgtatatcctcgctcacatcgagcgagtagacagtctacctcagactgtctagatatacgtttaataacacaatcctcactgaagtggatactgtcgatggtac

SEQ ID NO: 510 - DNA, 150 bp, Artificial Sequence
  Synthetic polynucleotide
gtaatacgactcactatagctcacctattaatccattacctccttcgaccagatacgagtatcaactactcgttcataacagtccctaactgttatgaatctggtcgaaactaattcacctccttctgaagtggatactgtcgatggtac

SEQ ID NO: 511 - DNA, 150 bp, Artificial Sequence
  Synthetic polynucleotide
gtaatacgactcactatagctcacctaatcctcaactactacctacaaggattagaagcgccaatcgcgcttctatcggttccctcacggaaccgatataatccttgtacatatcactccaattcctgaagtggatactgtcgatggtac

SEQ ID NO: 512 - DNA, 150 bp, Artificial Sequence
  Synthetic polynucleotide
gtaatacgactcactatagctcaccttataacttctccattaccatgccgcaatcacctagcacatctaggtgattcttcaggcacctcctgaagaatattgcggcatatacaacctccattccaatgaagtggatactgtcgatggtac

SEQ ID NO: 513 - DNA, 150 bp, Artificial Sequence
  Synthetic polynucleotide
gtaatacgactcactatagctcacctactcacatccaacattctactgatatgatgcgttgtccaacaacgcagtcttcctggcactcccaggaagactcatatcagttacatcttcttcctcacttgaagtggatactgtcgatggtac

SEQ ID NO: 514 - DNA, 150 bp, Artificial Sequence
  Synthetic polynucleotide
gtaatacgactcactatagctcacctccaatcataacatattccggtaagcagtagtactacaacttagtactgttgccagatcctcaatctggcaacactgcttaccttcttcaccaacttatcctgaagtggatactgtcgatggtac

SEQ ID NO: 515 - DNA, 150 bp, Artificial Sequence
  Synthetic polynucleotide
gtaatacgactcactatagctcacctttaacctatacacctcaccaggcgttcgggtagccaactcggctacctagcgttaacccctagttaacgctacgaacgcctgatataccacacctcataatgaagtggatactgtcgatggtac

SEQ ID NO: 516 - DNA, 150 bp, Artificial Sequence
  Synthetic polynucleotide
gtaatacgactcactatagctcacctttcacaccattatccttcataagtcagcgctctctaccatagagagcgctaccggcatcacctgccggtagcgctgacttatacattacctccttccttatgaagtggatactgtcgatggtac

SEQ ID NO: 517 - DNA, 150 bp, Artificial Sequence
  Synthetic polynucleotide
gtaatacgactcactatagctcaccttctaactcctcatataccgcaacaaccatagtgttaactcaacactacagacgctcaatccctgagcgtctgtggttgttgctcattcaactaccaactatgaagtggatactgtcgatggtac

SEQ ID NO: 518 - DNA, 150 bp, Artificial Sequence
  Synthetic polynucleotide
gtaatacgactcactatagctcacctctcaccaattacctaatagatgcgtgccttggcaacacatttgccaaggctagaagcccatcgcttctagccggcacgcatctaacattcaccatactactgaagtggatactgtcgatggtac

SEQ ID NO: 519 - DNA, 150 bp, Artificial Sequence
  Synthetic polynucleotide
gtaatacgactcactatagctcacctactctaatacaccttcacgacgactcgccaggagatacactctcctgtgcgccttccacctcggaaggcgcagcgagtcgtcatcaatctcactcaacattgaagtggatactgtcgatggtac

SEQ ID NO: 520 - DNA, 150 bp, Artificial Sequence
  Synthetic polynucleotide
gtaatacgactcactatagctcacctttcttacacaacctatccttgcgcagaccgcgatgacatccatcgcgggcggtaaggatcccccttaccgccgtctgcgcaacaatattcattcctcacctgaagtggatactgtcgatggtac

SEQ ID NO: 521 - DNA, 150 bp, Artificial Sequence
  Synthetic polynucleotide
gtaatacgactcactatagctcacctaatcaccacttcctacatgcctggcgcatggtactcacatagtaccaagcgacaccttcccaaggtgtcgcttgcgccaggctacattcactcacctacttgaagtggatactgtcgatggtac

SEQ ID NO: 522 - DNA, 150 bp, Artificial Sequence
  Synthetic polynucleotide
gtaatacgactcactatagctcacctcaccaatacatatcctaccgagcgctgtaccactgactcacagtggtcaggctgcgccccatgcgcagcctgacagcgctcgccataacctctatacacatgaagtggatactgtcgatggtac

SEQ ID NO: 523 - DNA, 150 bp, Artificial Sequence
  Synthetic polynucleotide
gtaatacgactcactatagctcaccttcttcaccatacttacaccgtccgactacgtgccgcaactcggcacggccggtccgcactccgcggaccggctagtcggacgtcctacaacctcattctatgaagtggatactgtcgatggtac

SEQ ID NO: 524 - DNA, 150 bp, Artificial Sequence
  Synthetic polynucleotide
gtaatacgactcactatagctcaccttctcacaatcttaaccaacactgtcgccctacgtataacctacgtaggctctccgcgcctaccgcggagagcggcgacagtgcaacattaaccttatcactgaagtggatactgtcgatggtac

SEQ ID NO: 525 - DNA, 150 bp, Artificial Sequence
  Synthetic polynucleotide
gtaatacgactcactatagctcacctattaacactcatccatctggcggccgcgttagctcccaatgagctaaccatcctcagctccactgaggatggcgcggccgccattacatcctccaatcactgaagtggatactgtcgatggtac

SEQ ID NO: 526 - DNA, 150 bp, Artificial Sequence
  Synthetic polynucleotide
gtaatacgactcactatagctcacctataaccaccaactctatcccgatggcggaagatacaactcgtatcttagcggccggccactcgccggccgctccgccatcggtacacaataactccttcatgaagtggatactgtcgatggtac

SEQ ID NO: 527 - DNA, 150 bp, Artificial Sequence
  Synthetic polynucleotide
gtaatacgactcactatagctcacctaattattcaccaccaacttgatattgctcgacctacgagcaaagtgtcccatacacttatgccagccctaagctggcatcaagaattcattcctaacacctgaagtggatactgtcgatggtac

SEQ ID NO: 528 - DNA, 150 bp, Artificial Sequence
  Synthetic polynucleotide
gtaatacgactcactatagctcacctatatctacctctcactaactacacgctagtatccaactagcgcagtaccatctactgtgtggacatctacaatgtccatagttctcactacaccaattaatgaagtggatactgtcgatggtac

SEQ ID NO: 529 - DNA, 150 bp, Artificial Sequence
  Synthetic polynucleotide
gtaatacgactcactatagctcacctcacattacaacctaacgtaacatgagtgcactaactgcactctctagtccacctagaatacaatcttccaaagattgtgttacattcctcattcattcactgaagtggatactgtcgatggtac

SEQ ID NO: 530 - DNA, 150 bp, Artificial Sequence
  Synthetic polynucleotide
gtaatacgactcactatagctcacctattcaatcacacctcacctatatgatgtctcatacagacatcgaaccctccaggttcattaagcagataccctgcttaataggcaacaatctcttcttcatgaagtggatactgtcgatggtac

SEQ ID NO: 531 - DNA, 150 bp, Artificial Sequence
  Synthetic polynucleotide
gtaatacgactcactatagctcaccttatacacaaccaatcaatacggtttgtagatcacatctacaagaactcactcagttcacggcagtcactcagactgcccgtattataacatccacaccattgaagtggatactgtcgatggtac

SEQ ID NO: 532 - DNA, 150 bp, Artificial Sequence
  Synthetic polynucleotide
gtaatacgactcactatagctcacctatcattcacacaacaatagtcgaactggaataccattccagtaccaacatccttggttcgacgaagacctacttcgtcgactataactctcttcttaccatgaagtggatactgtcgatggtac

SEQ ID NO: 533 - DNA, 150 bp, Artificial Sequence
  Synthetic polynucleotide
gtaatacgactcactatagctcacctattcatatccttatccagaacagagtaagcaccatgcttacttgtagaccctctacactaacgaattaaccattcgttgttctcatatatcctactaccttgaagtggatactgtcgatggtac

SEQ ID NO: 534 - DNA, 150 bp, Artificial Sequence
  Synthetic polynucleotide
gtaatacgactcactatagctcacctttcaccaacttaaccttagtcgcgaggctgaccatcagcctccgttacaccttaacggcagaattctcaacgaattctgactattaccattccacaacaatgaagtggatactgtcgatggtac

SEQ ID NO: 535 - DNA, 150 bp, Artificial Sequence
  Synthetic polynucleotide
gtaatacgactcactatagctcacctcaattaccttccatactccgataacgaggcaatccgcctcgtggaaccacctgttcctagcctggataccatccaggctcggaatacttcaaccttcctttgaagtggatactgtcgatggtac

SEQ ID NO: 536 - DNA, 150 bp, Artificial Sequence
  Synthetic polynucleotide
gtaatacgactcactatagctcacctacacaacttaaccaatctacttgtcgcaggatccacctgcgaacggtcctcaaccgtcacggactttaaccaagtccgagtagctacattatcctctctatgaagtggatactgtcgatggtac

SEQ ID NO: 537 - DNA, 150 bp, Artificial Sequence
  Synthetic polynucleotide
gtaatacgactcactatagctcacctacttacttcttattccatacgcaacttctcaacctgagaagtagacgcccatcgtcttgttagtggctaacccactaacgtattaactcacaacaactcatgaagtggatactgtcgatggtac

SEQ ID NO: 538 - DNA, 150 bp, Artificial Sequence
  Synthetic polynucleotide
gtaatacgactcactatagctcaccttattctccacctattcggccggagacgataatacctatcgtcttcacccactgtgaatccttgccaaatcctggcaagcggccactatccttatctcaactgaagtggatactgtcgatggtac

SEQ ID NO: 539 - DNA, 150 bp, Artificial Sequence
  Synthetic polynucleotide
gtaatacgactcactatagctcacctacatacctccaatcaacctgtcattccggccaactgccggaaggcagacctcctgcctggagctcaaccattgagctcacaggacataactcattcttcctgaagtggatactgtcgatggtac

SEQ ID NO: 540 - DNA, 150 bp, Artificial Sequence
  Synthetic polynucleotide
gtaatacgactcactatagctcaccttccacttacatatatcggcgtggagcaagtctaacacttgctataggctacccctatccgtggtctactcaagaccacacgccactaccttaacattccatgaagtggatactgtcgatggtac

SEQ ID NO: 541 - DNA, 150 bp, Artificial Sequence
  Synthetic polynucleotide
gtaatacgactcactatagctcacctacttcaacctcattcttaccaccacaagcgccatacgcttgtggcagtacccctgccggtgcgaagtacaccttcgcatggtaattcttcaacctctcaatgaagtggatactgtcgatggtac

SEQ ID NO: 542 - DNA, 150 bp, Artificial Sequence
  Synthetic polynucleotide
gtaatacgactcactatagctcacctaccaactaacaccttacagccgaactctgcaatccgcagagttgcgcatcccgcgcatcgctaactcatcaagttagcggctgctcacttctattctctttgaagtggatactgtcgatggtac

SEQ ID NO: 543 - DNA, 150 bp, Artificial Sequence
  Synthetic polynucleotide
gtaatacgactcactatagctcacctcattaacacctctctagcaggtctcattgaccaattcaatgaacgcgtaccccgcgtgattcaacgaatcccgttgaacctgcctaccaccattatatcatgaagtggatactgtcgatggtac

SEQ ID NO: 544 - DNA, 150 bp, Artificial Sequence
  Synthetic polynucleotide
gtaatacgactcactatagctcacctttctcatctcttccttggtcgcatccgtcgtcaaccgacggagtcggcatccccgactgggtgcgaaccattcgcacccgaccaatacacttcctcattctgaagtggatactgtcgatggtac

SEQ ID NO: 545 - DNA, 150 bp, Artificial Sequence
  Synthetic polynucleotide
gtaatacgactcactatagctcacctacctcacaatatctatgccgcgctgttaagaactccttaacactcgtcctacacgaggcagtgcaccactagtgcactgcggcactatactccttctctatgaagtggatactgtcgatggtac

SEQ ID NO: 546 - DNA, 150 bp, Artificial Sequence
  Synthetic polynucleotide
gtaatacgactcactatagctcacctttcatccatacaccatgaggcgctggtacccaatcggtaccaggtgccccatgcaccgcccaggtccatacgacctgggcctccaacttactaatctccttgaagtggatactgtcgatggtac

SEQ ID NO: 547 - DNA, 150 bp, Artificial Sequence
  Synthetic polynucleotide
gtaatacgactcactatagctcacctaacaccaactaacacaataacctagtaccccaatcgggtaagatccatcatctctagcagcatatacatcatatgctggttattgttattcctatcacactgaagtggatactgtcgatggtac

SEQ ID NO: 548 - DNA, 150 bp, Artificial Sequence
  Synthetic polynucleotide
gtaatacgactcactatagctcacctcaacatccttcttacaatgttttgtcctactaaccgtaggacctctaccaggtacaaaaccagaacaatcttctggttaacattgaacatccaatctctttgaagtggatactgtcgatggtac

SEQ ID NO: 549 - DNA, 150 bp, Artificial Sequence
  Synthetic polynucleotide
gtaatacgactcactatagctcacctctcaattcctcattatagttactgacactcacctagagtgtggccctacgccatcagagaaccgatcaactcggttcttaactatctcataactcatctttgaagtggatactgtcgatggtac

SEQ ID NO: 550 - DNA, 150 bp, Artificial Sequence
  Synthetic polynucleotide
gtaatacgactcactatagctcacctaccttaatccatctggagttatgtgtcacctccaaggtgaacatcatccatgtcacagaatagaccctaagtctattctaactcccaacttacaatccattgaagtggatactgtcgatggtac

SEQ ID NO: 551 - DNA, 150 bp, Artificial Sequence
  Synthetic polynucleotide
gtaatacgactcactatagctcaccttacaatccatccattgcattactggccatccaactgatggatcgatccccgatccagacggtagatccaatctaccgttaatgcaaacttacacaccatttgaagtggatactgtcgatggtac

SEQ ID NO: 552 - DNA, 150 bp, Artificial Sequence
  Synthetic polynucleotide
gtaatacgactcactatagctcacctataatctacctctcatacaagggatctcacccatagtgaggagctcaccgctcatcctaggcactcaatcagtgcctacttgtatcttatccatacattctgaagtggatactgtcgatggtac

SEQ ID NO: 553 - DNA, 150 bp, Artificial Sequence
  Synthetic polynucleotide
gtaatacgactcactatagctcacctatattccataccaccgcgttcgtgttcccatccaatgggaccggaccctccggacacaataaggtataccaccttattgaacgcgtatatctctaactcctgaagtggatactgtcgatggtac

SEQ ID NO: 554 - DNA, 150 bp, Artificial Sequence
  Synthetic polynucleotide
gtaatacgactcactatagctcacctctaattcacatccatagacaatgctcctacccaatgtaggagagacctcctctagcaggccgttcaactcgaacggccttgtctaatccataattctccttgaagtggatactgtcgatggtac

SEQ ID NO: 555 - DNA, 150 bp, Artificial Sequence
  Synthetic polynucleotide
gtaatacgactcactatagctcaccttaacttcctatctcaccgtgaatgtcctaccaactgtaggtacccacctggtaacatacttcctgcacatcaggaagttcacggtataccacaatactcatgaagtggatactgtcgatggtac

SEQ ID NO: 556 - DNA, 150 bp, Artificial Sequence
  Synthetic polynucleotide
gtaatacgactcactatagctcacctctaattccatccaaaatcctcgagtcccatctaacatgggtcttatcccaagaactcctggagtgtacaccactccaggaggattattaacactcaactctgaagtggatactgtcgatggtac

SEQ ID NO: 557 - DNA, 150 bp, Artificial Sequence
  Synthetic polynucleotide
gtaatacgactcactatagctcaccttaccaataccactatgttccagaatactccaccatggagtgatccccatgatcattcgccttcgatacactcgaaggctggaacaactactacttctctatgaagtggatactgtcgatggtac

SEQ ID NO: 558 - DNA, 150 bp, Artificial Sequence
  Synthetic polynucleotide
gtaatacgactcactatagctcacctaccatatcattcctgccggatggcaccctaaatcctagggggtctccacgacctgcctaccgccactaactggcggtaatccggctaacaaccttcacattgaagtggatactgtcgatggtac

SEQ ID NO: 559 - DNA, 150 bp, Artificial Sequence
  Synthetic polynucleotide
gtaatacgactcactatagctcacctatctaatcctctacgcggttcacatcctcacatcatgaggccgtccctaacggatgtatcgtggctcacagccacgatgaaccgcaactataaccaccaatgaagtggatactgtcgatggtac

SEQ ID NO: 560 - DNA, 150 bp, Artificial Sequence
  Synthetic polynucleotide
gtaatacgactcactatagctcacctatacttccttcacatcttcaggacgatccccatacgggatgccacatcctggccgtccacgcgccctacaggcgcgtgctgaagataatatctccatctctgaagtggatactgtcgatggtac

SEQ ID NO: 561 - DNA, 150 bp, Artificial Sequence
  Synthetic polynucleotide
gtaatacgactcactatagctcacctaacattatcctacccgtcctgaccgactccaatccggagttcctccactaggacggtccacgtgtctcaaacacgtggcaggacgccaactaacttcatatgaagtggatactgtcgatggtac

SEQ ID NO: 562 - DNA, 150 bp, Artificial Sequence
  Synthetic polynucleotide
gtaatacgactcactatagctcacctactaaccactcatacgccgccttgctcccataacctgggagcctcctcaaggcgcaaacaagcctcactaaggcttgtggcggcgtcattacttcaaccttgaagtggatactgtcgatggtac

SEQ ID NO: 563 - DNA, 150 bp, Artificial Sequence
  Synthetic polynucleotide
gtaatacgactcactatagctcacctactctcttatatccgtctcgctgcccctaccaactgtagggcttctcacaagcggcacgcaggagcatcactcctgcggcgagacatctaattccaccaatgaagtggatactgtcgatggtac

SEQ ID NO: 564 - DNA, 150 bp, Artificial Sequence
  Synthetic polynucleotide
gtaatacgactcactatagctcacctcattatctctaccactgacgcgtcactcaccactagtgagcacttccacagtgtgacgccggaacatccagttccggcgcgtcagttacttcattactcctgaagtggatactgtcgatggtac

SEQ ID NO: 565 - DNA, 150 bp, Artificial Sequence
  Synthetic polynucleotide
gtaatacgactcactatagctcacctaataatcctcacacgcgaagcatggcctcaacacttgaggaacataccctgttccatggccgccgacctacggcggccgcttcgcaatacttaccattcctgaagtggatactgtcgatggtac

SEQ ID NO: 566 - DNA, 150 bp, Artificial Sequence
  Synthetic polynucleotide
gtaatacgactcactatagctcacctcacttaacttccatcatccgctggactccacaacttggaggttgtcacccaactccaggtgccggctcaaccggcaccgcggatgccataactctaactttgaagtggatactgtcgatggtac

SEQ ID NO: 567 - DNA, 150 bp, Artificial Sequence
  Synthetic polynucleotide
gtaatacgactcactataggctcactatccaactccttctgtatggtgaggctcactcagcctcaccatacagcactcctgtatggtgaggctcactcagcctcaccatacagtccattccaccatagtgaaggatacgagatgctagtg

SEQ ID NO: 568 - DNA, 150 bp, Artificial Sequence
  Synthetic polynucleotide
gtaatacgactcactataggctcactatccaactccttctgtatgcgtgaggctcactcagcctcaccatacagcactcctgtatgcgtgaggctcactcagcctcaccatacagtccattccaccagtgaaggatacgagatgctagtg

SEQ ID NO: 569 - DNA, 150 bp, Artificial Sequence
  Synthetic polynucleotide
gtaatacgactcactataggctcactatccaactccttctgtatgctgaggctcactcagcctcaccatacagcactcctgtatgctgaggctcactcagcctcaccatacagtccattccaccatagtgaaggatacgagatgctagtg

SEQ ID NO: 570 - DNA, 150 bp, Artificial Sequence
  Synthetic polynucleotide
gtaatacgactcactataggctcactatccaactcctttgacacgtagcttcccactcggaagctacgtgtcacactctgacacgtagcttcccactcggaagctacgtgtcatccattccaccatagtgaaggatacgagatgctagtg

SEQ ID NO: 571 - DNA, 150 bp, Artificial Sequence
  Synthetic polynucleotide
gtaatacgactcactataggctcactatccaactcctttgacacgctagcttcccactcggaagctacgtgtcacactctgacacgctagcttcccactcggaagctacgtgtcatccattccaccagtgaaggatacgagatgctagtg

SEQ ID NO: 572 - DNA, 150 bp, Artificial Sequence
  Synthetic polynucleotide
gtaatacgactcactataggctcactatccaactcctttgacacgaagcttcccactcggaagctacgtgtcacactctgacacgaagcttcccactcggaagctacgtgtcatccattccaccatagtgaaggatacgagatgctagtg

SEQ ID NO: 573 - DNA, 150 bp, Artificial Sequence
  Synthetic polynucleotide
gtaatacgactcactataggctcactatccaactccttcttacaccggtaaggcactcccttaccggtgtaagcactccttacaccggtaaggcactcccttaccggtgtaagtccattccaccatagtgaaggatacgagatgctagtg

SEQ ID NO: 574 - DNA, 150 bp, Artificial Sequence
  Synthetic polynucleotide
gtaatacgactcactataggctcactatccaactccttcttacacccggtaaggcactcccttaccggtgtaagcactccttacacccggtaaggcactcccttaccggtgtaagtccattccaccagtgaaggatacgagatgctagtg

SEQ ID NO: 575 - DNA, 150 bp, Artificial Sequence
  Synthetic polynucleotide
gtaatacgactcactataggctcactatccaactccttcttacacgggtaaggcactcccttaccggtgtaagcactccttacacgggtaaggcactcccttaccggtgtaagtccattccaccatagtgaaggatacgagatgctagtg

SEQ ID NO: 576 - DNA, 150 bp, Artificial Sequence
  Synthetic polynucleotide
gtaatacgactcactataggctcactctaacacactcactgtatggtgaggctacgcaagcctcaccatacagcactcctgtatggtgaggctacgcaagcctcaccatacagacacctaactccaagtgaaggatacgagatgctagtg

SEQ ID NO: 577 - DNA, 150 bp, Artificial Sequence
  Synthetic polynucleotide
gtaatacgactcactataggctcactctaacacactcactgtatgcgtgaggctacgcaagcctcaccatacagcactcctgtatgcgtgaggctacgcaagcctcaccatacagacacctaactcagtgaaggatacgagatgctagtg

SEQ ID NO: 578 - DNA, 150 bp, Artificial Sequence
  Synthetic polynucleotide
gtaatacgactcactataggctcactctaacacactcactgtatgctgaggctacgcaagcctcaccatacagcactcctgtatgctgaggctacgcaagcctcaccatacagacacctaactccaagtgaaggatacgagatgctagtg

SEQ ID NO: 579 - DNA, 150 bp, Artificial Sequence
  Synthetic polynucleotide
gtaatacgactcactataggctcactctaacacactcatgacacgtagcttccacgcaggaagctacgtgtcacactctgacacgtagcttccacgcaggaagctacgtgtcaacacctaactccaagtgaaggatacgagatgctagtg

SEQ ID NO: 580 - DNA, 150 bp, Artificial Sequence
  Synthetic polynucleotide
gtaatacgactcactataggctcactctaacacactcatgacacgctagcttccacgcaggaagctacgtgtcacactctgacacgctagcttccacgcaggaagctacgtgtcaacacctaactcagtgaaggatacgagatgctagtg

SEQ ID NO: 581 - DNA, 150 bp, Artificial Sequence
  Synthetic polynucleotide
gtaatacgactcactataggctcactctaacacactcatgacacgaagcttccacgcaggaagctacgtgtcacactctgacacgaagcttccacgcaggaagctacgtgtcaacacctaactccaagtgaaggatacgagatgctagtg

SEQ ID NO: 582 - DNA, 150 bp, Artificial Sequence
  Synthetic polynucleotide
gtaatacgactcactataggctcactctaacacactcacttacaccggtaaggacgcaccttaccggtgtaagcactccttacaccggtaaggacgcaccttaccggtgtaagacacctaactccaagtgaaggatacgagatgctagtg

SEQ ID NO: 583 - DNA, 150 bp, Artificial Sequence
  Synthetic polynucleotide
gtaatacgactcactataggctcactctaacacactcacttacacccggtaaggacgcaccttaccggtgtaagcactccttacacccggtaaggacgcaccttaccggtgtaagacacctaactcagtgaaggatacgagatgctagtg

SEQ ID NO: 584 - DNA, 150 bp, Artificial Sequence
  Synthetic polynucleotide
gtaatacgactcactataggctcactctaacacactcacttacacgggtaaggacgcaccttaccggtgtaagcactccttacacgggtaaggacgcaccttaccggtgtaagacacctaactccaagtgaaggatacgagatgctagtg

SEQ ID NO: 585 - DNA, 150 bp, Artificial Sequence
  Synthetic polynucleotide
gtaatacgactcactataggctcactctatattctgtatggtgaggctctataccaacagcctcaccatacagcactcctgtatggtgaggctctataccaacagcctcaccatacagtcctacctagtgaaggatacgagatgctagtg

SEQ ID NO: 586 - DNA, 150 bp, Artificial Sequence
  Synthetic polynucleotide
gtaatacgactcactataggctcactctatattctgtatgcgtgaggctctataccaacagcctcaccatacagcactcctgtatgcgtgaggctctataccaacagcctcaccatacagtcctacagtgaaggatacgagatgctagtg

SEQ ID NO: 587 - DNA, 150 bp, Artificial Sequence
  Synthetic polynucleotide
gtaatacgactcactataggctcactctatattctgtatgctgaggctctataccaacagcctcaccatacagcactcctgtatgctgaggctctataccaacagcctcaccatacagtcctacctagtgaaggatacgagatgctagtg

SEQ ID NO: 588 - DNA, 150 bp, Artificial Sequence
  Synthetic polynucleotide
gtaatacgactcactataggctcactctatatttgacacgtagcttccctataccaacggaagctacgtgtcacactctgacacgtagcttccctataccaacggaagctacgtgtcatcctacctagtgaaggatacgagatgctagtg

SEQ ID NO: 589 - DNA, 150 bp, Artificial Sequence
  Synthetic polynucleotide
gtaatacgactcactataggctcactctatatttgacacgctagcttccctataccaacggaagctacgtgtcacactctgacacgctagcttccctataccaacggaagctacgtgtcatcctacagtgaaggatacgagatgctagtg

SEQ ID NO: 590 - DNA, 150 bp, Artificial Sequence
  Synthetic polynucleotide
gtaatacgactcactataggctcactctatatttgacacgaagcttccctataccaacggaagctacgtgtcacactctgacacgaagcttccctataccaacggaagctacgtgtcatcctacctagtgaaggatacgagatgctagtg

SEQ ID NO: 591 - DNA, 150 bp, Artificial Sequence
  Synthetic polynucleotide
gtaatacgactcactataggctcactctatattcttacaccggtaaggctataccaacccttaccggtgtaagcactccttacaccggtaaggctataccaacccttaccggtgtaagtcctacctagtgaaggatacgagatgctagtg

SEQ ID NO: 592 - DNA, 150 bp, Artificial Sequence
  Synthetic polynucleotide
gtaatacgactcactataggctcactctatattcttacacccggtaaggctataccaacccttaccggtgtaagcactccttacacccggtaaggctataccaacccttaccggtgtaagtcctacagtgaaggatacgagatgctagtg

SEQ ID NO: 593 - DNA, 150 bp, Artificial Sequence
  Synthetic polynucleotide
gtaatacgactcactataggctcactctatattcttacacgggtaaggctataccaacccttaccggtgtaagcactccttacacgggtaaggctataccaacccttaccggtgtaagtcctacctagtgaaggatacgagatgctagtg

SEQ ID NO: 594 - DNA, 150 bp, Artificial Sequence
  Synthetic polynucleotide
gtaatacgactcactataggctcactccaacaactgtatggtgaggcttcttgtccacagcctcaccatacagcactcctgtatggtgaggcttcttgtccacagcctcaccatacagcttacctcagtgaaggatacgagatgctagtg

SEQ ID NO: 595 - DNA, 150 bp, Artificial Sequence
  Synthetic polynucleotide
gtaatacgactcactataggctcactccaacaactgtatgcgtgaggcttcttgtccacagcctcaccatacagcactcctgtatgcgtgaggcttcttgtccacagcctcaccatacagcttaccagtgaaggatacgagatgctagtg

SEQ ID NO: 596 - DNA, 150 bp, Artificial Sequence
  Synthetic polynucleotide
gtaatacgactcactataggctcactccaacaactgtatgctgaggcttcttgtccacagcctcaccatacagcactcctgtatgctgaggcttcttgtccacagcctcaccatacagcttacctcagtgaaggatacgagatgctagtg

SEQ ID NO: 597 - DNA, 150 bp, Artificial Sequence
  Synthetic polynucleotide
gtaatacgactcactataggctcactccaacaatgacacgtagcttcctcttgtccacggaagctacgtgtcacactctgacacgtagcttcctcttgtccacggaagctacgtgtcacttacctcagtgaaggatacgagatgctagtg

SEQ ID NO: 598 - DNA, 150 bp, Artificial Sequence
  Synthetic polynucleotide
gtaatacgactcactataggctcactccaacaatgacacgctagcttcctcttgtccacggaagctacgtgtcacactctgacacgctagcttcctcttgtccacggaagctacgtgtcacttaccagtgaaggatacgagatgctagtg

SEQ ID NO: 599 - DNA, 150 bp, Artificial Sequence
  Synthetic polynucleotide
gtaatacgactcactataggctcactccaacaatgacacgaagcttcctcttgtccacggaagctacgtgtcacactctgacacgaagcttcctcttgtccacggaagctacgtgtcacttacctcagtgaaggatacgagatgctagtg

SEQ ID NO: 600 - DNA, 150 bp, Artificial Sequence
  Synthetic polynucleotide
gtaatacgactcactataggctcactccaacaacttacaccggtaaggtcttgtccacccttaccggtgtaagcactccttacaccggtaaggtcttgtccacccttaccggtgtaagcttacctcagtgaaggatacgagatgctagtg

SEQ ID NO: 601 - DNA, 150 bp, Artificial Sequence
  Synthetic polynucleotide
gtaatacgactcactataggctcactccaacaacttacacccggtaaggtcttgtccacccttaccggtgtaagcactccttacacccggtaaggtcttgtccacccttaccggtgtaagcttaccagtgaaggatacgagatgctagtg

SEQ ID NO: 602 - DNA, 150 bp, Artificial Sequence
  Synthetic polynucleotide
gtaatacgactcactataggctcactccaacaacttacacgggtaaggtcttgtccacccttaccggtgtaagcactccttacacgggtaaggtcttgtccacccttaccggtgtaagcttacctcagtgaaggatacgagatgctagtg

SEQ ID NO: 603 - DNA, 150 bp, Artificial Sequence
  Synthetic polynucleotide
gtaatacgactcactataggctcactcactgtatggtgaggctacttcttacaacctcagcctcaccatacagcactcctgtatggtgaggctacttcttacaacctcagcctcaccatacagccaagtgaaggatacgagatgctagtg

SEQ ID NO: 604 - DNA, 150 bp, Artificial Sequence
  Synthetic polynucleotide
gtaatacgactcactataggctcactcactgtatgcgtgaggctacttcttacaacctcagcctcaccatacagcactcctgtatgcgtgaggctacttcttacaacctcagcctcaccatacagcagtgaaggatacgagatgctagtg

SEQ ID NO: 605 - DNA, 150 bp, Artificial Sequence
  Synthetic polynucleotide
gtaatacgactcactataggctcactcactgtatgctgaggctacttcttacaacctcagcctcaccatacagcactcctgtatgctgaggctacttcttacaacctcagcctcaccatacagccaagtgaaggatacgagatgctagtg

SEQ ID NO: 606 - DNA, 150 bp, Artificial Sequence
  Synthetic polynucleotide
gtaatacgactcactataggctcactcatgacacgtagcttccacttcttacaacctcggaagctacgtgtcacactctgacacgtagcttccacttcttacaacctcggaagctacgtgtcaccaagtgaaggatacgagatgctagtg

SEQ ID NO: 607 - DNA, 150 bp, Artificial Sequence
  Synthetic polynucleotide
gtaatacgactcactataggctcactcatgacacgctagcttccacttcttacaacctcggaagctacgtgtcacactctgacacgctagcttccacttcttacaacctcggaagctacgtgtcacagtgaaggatacgagatgctagtg

SEQ ID NO: 608 - DNA, 150 bp, Artificial Sequence
  Synthetic polynucleotide
gtaatacgactcactataggctcactcatgacacgaagcttccacttcttacaacctcggaagctacgtgtcacactctgacacgaagcttccacttcttacaacctcggaagctacgtgtcaccaagtgaaggatacgagatgctagtg

SEQ ID NO: 609 - DNA, 150 bp, Artificial Sequence
  Synthetic polynucleotide
gtaatacgactcactataggctcactcacttacaccggtaaggacttcttacaacctcccttaccggtgtaagcactccttacaccggtaaggacttcttacaacctcccttaccggtgtaagccaagtgaaggatacgagatgctagtg

SEQ ID NO: 610 - DNA, 150 bp, Artificial Sequence
  Synthetic polynucleotide
gtaatacgactcactataggctcactcacttacacccggtaaggacttcttacaacctcccttaccggtgtaagcactccttacacccggtaaggacttcttacaacctcccttaccggtgtaagcagtgaaggatacgagatgctagtg

SEQ ID NO: 611 - DNA, 150 bp, Artificial Sequence
  Synthetic polynucleotide
gtaatacgactcactataggctcactcacttacacgggtaaggacttcttacaacctcccttaccggtgtaagcactccttacacgggtaaggacttcttacaacctcccttaccggtgtaagccaagtgaaggatacgagatgctagtg

SEQ ID NO: 612 - DNA, 150 bp, Artificial Sequence
  Synthetic polynucleotide
gtaatacgactcactataggctcactacctgtatggtgaggctaacaggaacacgctcagcctcaccatacagcactcctgtatggtgaggctaacaggaacacgctcagcctcaccatacagatcagtgaaggatacgagatgctagtg

SEQ ID NO: 613 - DNA, 150 bp, Artificial Sequence
  Synthetic polynucleotide
gtaatacgactcactataggctcactacctgtatgcgtgaggctaacaggaacacgctcagcctcaccatacagcactcctgtatgcgtgaggctaacaggaacacgctcagcctcaccatacagaagtgaaggatacgagatgctagtg

SEQ ID NO: 614 - DNA, 150 bp, Artificial Sequence
  Synthetic polynucleotide
gtaatacgactcactataggctcactacctgtatgctgaggctaacaggaacacgctcagcctcaccatacagcactcctgtatgctgaggctaacaggaacacgctcagcctcaccatacagatcagtgaaggatacgagatgctagtg

SEQ ID NO: 615 - DNA, 150 bp, Artificial Sequence
  Synthetic polynucleotide
gtaatacgactcactataggctcactactgacacgtagcttccaacaggaacacgctcggaagctacgtgtcacactctgacacgtagcttccaacaggaacacgctcggaagctacgtgtcaatcagtgaaggatacgagatgctagtg

SEQ ID NO: 616 - DNA, 150 bp, Artificial Sequence
  Synthetic polynucleotide
gtaatacgactcactataggctcactactgacacgctagcttccaacaggaacacgctcggaagctacgtgtcacactctgacacgctagcttccaacaggaacacgctcggaagctacgtgtcaaagtgaaggatacgagatgctagtg

SEQ ID NO: 617 - DNA, 150 bp, Artificial Sequence
  Synthetic polynucleotide
gtaatacgactcactataggctcactactgacacgaagcttccaacaggaacacgctcggaagctacgtgtcacactctgacacgaagcttccaacaggaacacgctcggaagctacgtgtcaatcagtgaaggatacgagatgctagtg

SEQ ID NO: 618 - DNA, 150 bp, Artificial Sequence
  Synthetic polynucleotide
gtaatacgactcactataggctcactaccttacaccggtaaggaacaggaacacgctcccttaccggtgtaagcactccttacaccggtaaggaacaggaacacgctcccttaccggtgtaagatcagtgaaggatacgagatgctagtg

SEQ ID NO: 619 - DNA, 150 bp, Artificial Sequence
  Synthetic polynucleotide
gtaatacgactcactataggctcactaccttacacccggtaaggaacaggaacacgctcccttaccggtgtaagcactccttacacccggtaaggaacaggaacacgctcccttaccggtgtaagaagtgaaggatacgagatgctagtg

SEQ ID NO: 620 - DNA, 150 bp, Artificial Sequence
  Synthetic polynucleotide
gtaatacgactcactataggctcactaccttacacgggtaaggaacaggaacacgctcccttaccggtgtaagcactccttacacgggtaaggaacaggaacacgctcccttaccggtgtaagatcagtgaaggatacgagatgctagtg

SEQ ID NO: 621 - DNA, 150 bp, Artificial Sequence
  Synthetic polynucleotide
gtaatacgactcactataggctcactcgtaagtccaccatctggacttacgtgcacctccaagcatctaccatgcttggaggtgcaaatatatctccactaccaatactcttcctcaattctcctaagtgaaggatacgagatgctagtg

SEQ ID NO: 622 - DNA, 150 bp, Artificial Sequence
  Synthetic polynucleotide
gtaatacgactcactataggctcactcgtaagtccaccatctggacttacgaatattgcacctccaagcatctaccatgcttggaggtgcaatctccactaccaatactcttcctcaattctcctaagtgaaggatacgagatgctagtg

SEQ ID NO: 623 - DNA, 150 bp, Artificial Sequence
  Synthetic polynucleotide
gtaatacgactcactataggctcactcgtaagtccaccatctggacttacgaatatatctccactaccaattgcacctccaagcatctaccatgcttggaggtgcaactcttcctcaattctcctaagtgaaggatacgagatgctagtg

SEQ ID NO: 624 - DNA, 150 bp, Artificial Sequence
  Synthetic polynucleotide
gtaatacgactcactataggctcactcgtaagtccaccatctggacttacgaatatatctccactaccaatactcttcctcaattctcctatgcacctccaagcatctaccatgcttggaggtgcaagtgaaggatacgagatgctagtg

SEQ ID NO: 625 - DNA, 150 bp, Artificial Sequence
  Synthetic polynucleotide
gtaatacgactcactataggctcactaatatatctccactaccaatcgtaagtccaccatctggacttacgtgcacctccaagcatctaccatgcttggaggtgcaactcttcctcaattctcctaagtgaaggatacgagatgctagtg

SEQ ID NO: 626 - DNA, 150 bp, Artificial Sequence
  Synthetic polynucleotide
gtaatacgactcactataggctcactaatatatctccactaccaatcgtaagtccaccatctggacttacgactcttgcacctccaagcatctaccatgcttggaggtgcatcctcaattctcctaagtgaaggatacgagatgctagtg

SEQ ID NO: 627 - DNA, 150 bp, Artificial Sequence
  Synthetic polynucleotide
gtaatacgactcactataggctcactaatatatctccactaccaatcgtaagtccaccatctggacttacgactcttcctcaattctcctatgcacctccaagcatctaccatgcttggaggtgcaagtgaaggatacgagatgctagtg

SEQ ID NO: 628 - DNA, 150 bp, Artificial Sequence
  Synthetic polynucleotide
gtaatacgactcactataggctcactaatatatctccactatgcacctccaagcatctaccatgcttggaggtgcaccaatcgtaagtccaccatctggacttacgactcttcctcaattctcctaagtgaaggatacgagatgctagtg

SEQ ID NO: 629 - DNA, 150 bp, Artificial Sequence
  Synthetic polynucleotide
gtaatacgactcactataggctcactttggaactccccatcggagttccaaagagaaggagccgaactaccttcggctccttctctaatatatctccactaccaatactcttcctcaattctcctaagtgaaggatacgagatgctagtg

SEQ ID NO: 630 - DNA, 150 bp, Artificial Sequence
  Synthetic polynucleotide
gtaatacgactcactataggctcactttggaactccccatcggagttccaaaatatagagaaggagccgaactaccttcggctccttctctatctccactaccaatactcttcctcaattctcctaagtgaaggatacgagatgctagtg

SEQ ID NO: 631 - DNA, 150 bp, Artificial Sequence
  Synthetic polynucleotide
gtaatacgactcactataggctcactttggaactccccatcggagttccaaaatatatctccactaccaatagagaaggagccgaactaccttcggctccttctctactcttcctcaattctcctaagtgaaggatacgagatgctagtg

SEQ ID NO: 632 - DNA, 150 bp, Artificial Sequence
  Synthetic polynucleotide
gtaatacgactcactataggctcactttggaactccccatcggagttccaaaatatatctccactaccaatactcttcctcaattctcctaagagaaggagccgaactaccttcggctccttctctagtgaaggatacgagatgctagtg

SEQ ID NO: 633 - DNA, 150 bp, Artificial Sequence
  Synthetic polynucleotide
gtaatacgactcactataggctcactaatatatctccactaccaatttggaactccccatcggagttccaaagagaaggagccgaactaccttcggctccttctctactcttcctcaattctcctaagtgaaggatacgagatgctagtg

SEQ ID NO: 634 - DNA, 150 bp, Artificial Sequence
  Synthetic polynucleotide
gtaatacgactcactataggctcactaatatatctccactaccaatttggaactccccatcggagttccaaactctagagaaggagccgaactaccttcggctccttctcttcctcaattctcctaagtgaaggatacgagatgctagtg

SEQ ID NO: 635 - DNA, 150 bp, Artificial Sequence
  Synthetic polynucleotide
gtaatacgactcactataggctcactaatatatctccactaccaatttggaactccccatcggagttccaaactcttcctcaattctcctaagagaaggagccgaactaccttcggctccttctctagtgaaggatacgagatgctagtg

SEQ ID NO: 636 - DNA, 150 bp, Artificial Sequence
  Synthetic polynucleotide
gtaatacgactcactataggctcactaatatatctccactaagagaaggagccgaactaccttcggctccttctctccaatttggaactccccatcggagttccaaactcttcctcaattctcctaagtgaaggatacgagatgctagtg

SEQ ID NO: 637 - DNA, 150 bp, Artificial Sequence
  Synthetic polynucleotide
gtaatacgactcactataggctcactctccttagtgccatccactaaggaggtgtaagccgcttgactacctcaagcggcttacacaatatatctccactaccaatactcttcctcaattctcctaagtgaaggatacgagatgctagtg

SEQ ID NO: 638 - DNA, 150 bp, Artificial Sequence
  Synthetic polynucleotide
gtaatacgactcactataggctcactctccttagtgccatccactaaggagaatatgtgtaagccgcttgactacctcaagcggcttacacatctccactaccaatactcttcctcaattctcctaagtgaaggatacgagatgctagtg

SEQ ID NO: 639 - DNA, 150 bp, Artificial Sequence
  Synthetic polynucleotide
gtaatacgactcactataggctcactctccttagtgccatccactaaggagaatatatctccactaccaatgtgtaagccgcttgactacctcaagcggcttacacactcttcctcaattctcctaagtgaaggatacgagatgctagtg

SEQ ID NO: 640 - DNA, 150 bp, Artificial Sequence
  Synthetic polynucleotide
gtaatacgactcactataggctcactctccttagtgccatccactaaggagaatatatctccactaccaatactcttcctcaattctcctagtgtaagccgcttgactacctcaagcggcttacacagtgaaggatacgagatgctagtg

SEQ ID NO: 641 - DNA, 150 bp, Artificial Sequence
  Synthetic polynucleotide
gtaatacgactcactataggctcactaatatatctccactaccaatctccttagtgccatccactaaggaggtgtaagccgcttgactacctcaagcggcttacacactcttcctcaattctcctaagtgaaggatacgagatgctagtg

SEQ ID NO: 642 - DNA, 150 bp, Artificial Sequence
  Synthetic polynucleotide
gtaatacgactcactataggctcactaatatatctccactaccaatctccttagtgccatccactaaggagactctgtgtaagccgcttgactacctcaagcggcttacactcctcaattctcctaagtgaaggatacgagatgctagtg

SEQ ID NO: 643 - DNA, 150 bp, Artificial Sequence
  Synthetic polynucleotide
gtaatacgactcactataggctcactaatatatctccactaccaatctccttagtgccatccactaaggagactcttcctcaattctcctagtgtaagccgcttgactacctcaagcggcttacacagtgaaggatacgagatgctagtg

SEQ ID NO: 644 - DNA, 150 bp, Artificial Sequence
  Synthetic polynucleotide
gtaatacgactcactataggctcactaatatatctccactagtgtaagccgcttgactacctcaagcggcttacacccaatctccttagtgccatccactaaggagactcttcctcaattctcctaagtgaaggatacgagatgctagtg

SEQ ID NO: 645 - DNA, 150 bp, Artificial Sequence
  Synthetic polynucleotide
gtaatacgactcactataggctcactcgtaagtccaccatctggacttacgtgcacctccaagcatctaccatgcttggaggtgcaatattcctactccaacacctaattctaatccacctccttcagtgaaggatacgagatgctagtg

SEQ ID NO: 646 - DNA, 150 bp, Artificial Sequence
  Synthetic polynucleotide
gtaatacgactcactataggctcactcgtaagtccaccatctggacttacgatatttgcacctccaagcatctaccatgcttggaggtgcacctactccaacacctaattctaatccacctccttcagtgaaggatacgagatgctagtg

SEQ ID NO: 647 - DNA, 150 bp, Artificial Sequence
  Synthetic polynucleotide
gtaatacgactcactataggctcactcgtaagtccaccatctggacttacgatattcctactccaacaccttgcacctccaagcatctaccatgcttggaggtgcaaattctaatccacctccttcagtgaaggatacgagatgctagtg

SEQ ID NO: 648 - DNA, 150 bp, Artificial Sequence
  Synthetic polynucleotide
gtaatacgactcactataggctcactcgtaagtccaccatctggacttacgatattcctactccaacacctaattctaatccacctccttctgcacctccaagcatctaccatgcttggaggtgcaagtgaaggatacgagatgctagtg

SEQ ID NO: 649 - DNA, 150 bp, Artificial Sequence
  Synthetic polynucleotide
gtaatacgactcactataggctcactatattcctactccaacacctcgtaagtccaccatctggacttacgtgcacctccaagcatctaccatgcttggaggtgcaaattctaatccacctccttcagtgaaggatacgagatgctagtg

SEQ ID NO: 650 - DNA, 150 bp, Artificial Sequence
  Synthetic polynucleotide
gtaatacgactcactataggctcactatattcctactccaacacctcgtaagtccaccatctggacttacgaattctgcacctccaagcatctaccatgcttggaggtgcataatccacctccttcagtgaaggatacgagatgctagtg

SEQ ID NO: 651 - DNA, 150 bp, Artificial Sequence
  Synthetic polynucleotide
gtaatacgactcactataggctcactatattcctactccaacacctcgtaagtccaccatctggacttacgaattctaatccacctccttctgcacctccaagcatctaccatgcttggaggtgcaagtgaaggatacgagatgctagtg

SEQ ID NO: 652 - DNA, 150 bp, Artificial Sequence
  Synthetic polynucleotide
gtaatacgactcactataggctcactatattcctactccaatgcacctccaagcatctaccatgcttggaggtgcacacctcgtaagtccaccatctggacttacgaattctaatccacctccttcagtgaaggatacgagatgctagtg

SEQ ID NO: 653 - DNA, 150 bp, Artificial Sequence
  Synthetic polynucleotide
gtaatacgactcactataggctcactttggaactccccatcggagttccaaagagaaggagccgaactaccttcggctccttctctatattcctactccaacacctaattctaatccacctccttcagtgaaggatacgagatgctagtg

SEQ ID NO: 654 - DNA, 150 bp, Artificial Sequence
  Synthetic polynucleotide
gtaatacgactcactataggctcactttggaactccccatcggagttccaaatattagagaaggagccgaactaccttcggctccttctctcctactccaacacctaattctaatccacctccttcagtgaaggatacgagatgctagtg

SEQ ID NO: 655 - DNA, 150 bp, Artificial Sequence
  Synthetic polynucleotide
gtaatacgactcactataggctcactttggaactccccatcggagttccaaatattcctactccaacacctagagaaggagccgaactaccttcggctccttctctaattctaatccacctccttcagtgaaggatacgagatgctagtg

SEQ ID NO: 656 - DNA, 150 bp, Artificial Sequence
  Synthetic polynucleotide
gtaatacgactcactataggctcactttggaactccccatcggagttccaaatattcctactccaacacctaattctaatccacctccttcagagaaggagccgaactaccttcggctccttctctagtgaaggatacgagatgctagtg

SEQ ID NO: 657 - DNA, 150 bp, Artificial Sequence
  Synthetic polynucleotide
gtaatacgactcactataggctcactatattcctactccaacacctttggaactccccatcggagttccaaagagaaggagccgaactaccttcggctccttctctaattctaatccacctccttcagtgaaggatacgagatgctagtg

SEQ ID NO: 658 - DNA, 150 bp, Artificial Sequence
  Synthetic polynucleotide
gtaatacgactcactataggctcactatattcctactccaacacctttggaactccccatcggagttccaaaattcagagaaggagccgaactaccttcggctccttctcttaatccacctccttcagtgaaggatacgagatgctagtg

SEQ ID NO: 659 - DNA, 150 bp, Artificial Sequence
  Synthetic polynucleotide
gtaatacgactcactataggctcactatattcctactccaacacctttggaactccccatcggagttccaaaattctaatccacctccttcagagaaggagccgaactaccttcggctccttctctagtgaaggatacgagatgctagtg

SEQ ID NO: 660 - DNA, 150 bp, Artificial Sequence
  Synthetic polynucleotide
gtaatacgactcactataggctcactatattcctactccaaagagaaggagccgaactaccttcggctccttctctcacctttggaactccccatcggagttccaaaattctaatccacctccttcagtgaaggatacgagatgctagtg

SEQ ID NO: 661 - DNA, 150 bp, Artificial Sequence
  Synthetic polynucleotide
gtaatacgactcactataggctcactctccttagtgccatccactaaggaggtgtaagccgcttgactacctcaagcggcttacacatattcctactccaacacctaattctaatccacctccttcagtgaaggatacgagatgctagtg

SEQ ID NO: 662 - DNA, 150 bp, Artificial Sequence
  Synthetic polynucleotide
gtaatacgactcactataggctcactctccttagtgccatccactaaggagatattgtgtaagccgcttgactacctcaagcggcttacaccctactccaacacctaattctaatccacctccttcagtgaaggatacgagatgctagtg

SEQ ID NO: 663 - DNA, 150 bp, Artificial Sequence
  Synthetic polynucleotide
gtaatacgactcactataggctcactctccttagtgccatccactaaggagatattcctactccaacacctgtgtaagccgcttgactacctcaagcggcttacacaattctaatccacctccttcagtgaaggatacgagatgctagtg

SEQ ID NO: 664 - DNA, 150 bp, Artificial Sequence
  Synthetic polynucleotide
gtaatacgactcactataggctcactctccttagtgccatccactaaggagatattcctactccaacacctaattctaatccacctccttcgtgtaagccgcttgactacctcaagcggcttacacagtgaaggatacgagatgctagtg

SEQ ID NO: 665 - DNA, 150 bp, Artificial Sequence
  Synthetic polynucleotide
gtaatacgactcactataggctcactatattcctactccaacacctctccttagtgccatccactaaggaggtgtaagccgcttgactacctcaagcggcttacacaattctaatccacctccttcagtgaaggatacgagatgctagtg

SEQ ID NO: 666 - DNA, 150 bp, Artificial Sequence
  Synthetic polynucleotide
gtaatacgactcactataggctcactatattcctactccaacacctctccttagtgccatccactaaggagaattcgtgtaagccgcttgactacctcaagcggcttacactaatccacctccttcagtgaaggatacgagatgctagtg

SEQ ID NO: 667 - DNA, 150 bp, Artificial Sequence
  Synthetic polynucleotide
gtaatacgactcactataggctcactatattcctactccaacacctctccttagtgccatccactaaggagaattctaatccacctccttcgtgtaagccgcttgactacctcaagcggcttacacagtgaaggatacgagatgctagtg

SEQ ID NO: 668 - DNA, 150 bp, Artificial Sequence
  Synthetic polynucleotide
gtaatacgactcactataggctcactatattcctactccaagtgtaagccgcttgactacctcaagcggcttacaccacctctccttagtgccatccactaaggagaattctaatccacctccttcagtgaaggatacgagatgctagtg

SEQ ID NO: 669 - DNA, 150 bp, Artificial Sequence
  Synthetic polynucleotide
gtaatacgactcactataggctcactcgtaagtccaccatctggacttacgtgcacctccaagcatctaccatgcttggaggtgcaatcatccaccttaccaccttcacctccacctcctattcctagtgaaggatacgagatgctagtg

SEQ ID NO: 670 - DNA, 150 bp, Artificial Sequence
  Synthetic polynucleotide
gtaatacgactcactataggctcactcgtaagtccaccatctggacttacgatcattgcacctccaagcatctaccatgcttggaggtgcaccaccttaccaccttcacctccacctcctattcctagtgaaggatacgagatgctagtg

SEQ ID NO: 671 - DNA, 150 bp, Artificial Sequence
  Synthetic polynucleotide
gtaatacgactcactataggctcactcgtaagtccaccatctggacttacgatcatccaccttaccacctttgcacctccaagcatctaccatgcttggaggtgcacacctccacctcctattcctagtgaaggatacgagatgctagtg

SEQ ID NO: 672 - DNA, 150 bp, Artificial Sequence
  Synthetic polynucleotide
gtaatacgactcactataggctcactcgtaagtccaccatctggacttacgatcatccaccttaccaccttcacctccacctcctattccttgcacctccaagcatctaccatgcttggaggtgcaagtgaaggatacgagatgctagtg

SEQ ID NO: 673 - DNA, 150 bp, Artificial Sequence
  Synthetic polynucleotide
gtaatacgactcactataggctcactatcatccaccttaccaccttcgtaagtccaccatctggacttacgtgcacctccaagcatctaccatgcttggaggtgcacacctccacctcctattcctagtgaaggatacgagatgctagtg

SEQ ID NO: 674 - DNA, 150 bp, Artificial Sequence
  Synthetic polynucleotide
gtaatacgactcactataggctcactatcatccaccttaccaccttcgtaagtccaccatctggacttacgcaccttgcacctccaagcatctaccatgcttggaggtgcaccacctcctattcctagtgaaggatacgagatgctagtg

SEQ ID NO: 675 - DNA, 150 bp, Artificial Sequence
  Synthetic polynucleotide
gtaatacgactcactataggctcactatcatccaccttaccaccttcgtaagtccaccatctggacttacgcacctccacctcctattccttgcacctccaagcatctaccatgcttggaggtgcaagtgaaggatacgagatgctagtg

SEQ ID NO: 676 - DNA, 150 bp, Artificial Sequence
  Synthetic polynucleotide
gtaatacgactcactataggctcactatcatccaccttacctgcacctccaagcatctaccatgcttggaggtgcaaccttcgtaagtccaccatctggacttacgcacctccacctcctattcctagtgaaggatacgagatgctagtg

SEQ ID NO: 677 - DNA, 150 bp, Artificial Sequence
  Synthetic polynucleotide
gtaatacgactcactataggctcactttggaactccccatcggagttccaaagagaaggagccgaactaccttcggctccttctctatcatccaccttaccaccttcacctccacctcctattcctagtgaaggatacgagatgctagtg

SEQ ID NO: 678 - DNA, 150 bp, Artificial Sequence
  Synthetic polynucleotide
gtaatacgactcactataggctcactttggaactccccatcggagttccaaatcatagagaaggagccgaactaccttcggctccttctctccaccttaccaccttcacctccacctcctattcctagtgaaggatacgagatgctagtg

SEQ ID NO: 679 - DNA, 150 bp, Artificial Sequence
  Synthetic polynucleotide
gtaatacgactcactataggctcactttggaactccccatcggagttccaaatcatccaccttaccaccttagagaaggagccgaactaccttcggctccttctctcacctccacctcctattcctagtgaaggatacgagatgctagtg

SEQ ID NO: 680 - DNA, 150 bp, Artificial Sequence
  Synthetic polynucleotide
gtaatacgactcactataggctcactttggaactccccatcggagttccaaatcatccaccttaccaccttcacctccacctcctattcctagagaaggagccgaactaccttcggctccttctctagtgaaggatacgagatgctagtg

SEQ ID NO: 681 - DNA, 150 bp, Artificial Sequence
  Synthetic polynucleotide
gtaatacgactcactataggctcactatcatccaccttaccaccttttggaactccccatcggagttccaaagagaaggagccgaactaccttcggctccttctctcacctccacctcctattcctagtgaaggatacgagatgctagtg

SEQ ID NO: 682 - DNA, 150 bp, Artificial Sequence
  Synthetic polynucleotide
gtaatacgactcactataggctcactatcatccaccttaccaccttttggaactccccatcggagttccaacacctagagaaggagccgaactaccttcggctccttctctccacctcctattcctagtgaaggatacgagatgctagtg

SEQ ID NO: 683 - DNA, 150 bp, Artificial Sequence
  Synthetic polynucleotide
gtaatacgactcactataggctcactatcatccaccttaccaccttttggaactccccatcggagttccaacacctccacctcctattcctagagaaggagccgaactaccttcggctccttctctagtgaaggatacgagatgctagtg

SEQ ID NO: 684 - DNA, 150 bp, Artificial Sequence
  Synthetic polynucleotide
gtaatacgactcactataggctcactatcatccaccttaccagagaaggagccgaactaccttcggctccttctctaccttttggaactccccatcggagttccaacacctccacctcctattcctagtgaaggatacgagatgctagtg

SEQ ID NO: 685 - DNA, 150 bp, Artificial Sequence
  Synthetic polynucleotide
gtaatacgactcactataggctcactctccttagtgccatccactaaggaggtgtaagccgcttgactacctcaagcggcttacacatcatccaccttaccaccttcacctccacctcctattcctagtgaaggatacgagatgctagtg

SEQ ID NO: 686 - DNA, 150 bp, Artificial Sequence
  Synthetic polynucleotide
gtaatacgactcactataggctcactctccttagtgccatccactaaggagatcatgtgtaagccgcttgactacctcaagcggcttacacccaccttaccaccttcacctccacctcctattcctagtgaaggatacgagatgctagtg

SEQ ID NO: 687 - DNA, 150 bp, Artificial Sequence
  Synthetic polynucleotide
gtaatacgactcactataggctcactctccttagtgccatccactaaggagatcatccaccttaccaccttgtgtaagccgcttgactacctcaagcggcttacaccacctccacctcctattcctagtgaaggatacgagatgctagtg

SEQ ID NO: 688 - DNA, 150 bp, Artificial Sequence
  Synthetic polynucleotide
gtaatacgactcactataggctcactctccttagtgccatccactaaggagatcatccaccttaccaccttcacctccacctcctattcctgtgtaagccgcttgactacctcaagcggcttacacagtgaaggatacgagatgctagtg

SEQ ID NO: 689 - DNA, 150 bp, Artificial Sequence
  Synthetic polynucleotide
gtaatacgactcactataggctcactatcatccaccttaccaccttctccttagtgccatccactaaggaggtgtaagccgcttgactacctcaagcggcttacaccacctccacctcctattcctagtgaaggatacgagatgctagtg

SEQ ID NO: 690 - DNA, 150 bp, Artificial Sequence
  Synthetic polynucleotide
gtaatacgactcactataggctcactatcatccaccttaccaccttctccttagtgccatccactaaggagcacctgtgtaagccgcttgactacctcaagcggcttacacccacctcctattcctagtgaaggatacgagatgctagtg

SEQ ID NO: 691 - DNA, 150 bp, Artificial Sequence
  Synthetic polynucleotide
gtaatacgactcactataggctcactatcatccaccttaccaccttctccttagtgccatccactaaggagcacctccacctcctattcctgtgtaagccgcttgactacctcaagcggcttacacagtgaaggatacgagatgctagtg

SEQ ID NO: 692 - DNA, 150 bp, Artificial Sequence
  Synthetic polynucleotide
gtaatacgactcactataggctcactatcatccaccttaccgtgtaagccgcttgactacctcaagcggcttacacaccttctccttagtgccatccactaaggagcacctccacctcctattcctagtgaaggatacgagatgctagtg

SEQ ID NO: 693 - DNA, 150 bp, Artificial Sequence
  Synthetic polynucleotide
gtaatacgactcactataggctcactcttccttcaccacttgccgtggtgaaggcaactaactacttctacgggaagtagttacacatccatccaacctccacctctcgatgaggtggaggccactagtgaaggatacgagatgctagtg

SEQ ID NO: 694 - DNA, 150 bp, Artificial Sequence
  Synthetic polynucleotide
gtaatacgactcactataggctcactacttactcctacaattccttctctacctcgtccaggtagagaaaccaacctacccgtacggtaggttggcccctcacctcaccgcttgaggtgaggtccaagtgaaggatacgagatgctagtg

SEQ ID NO: 695 - DNA, 150 bp, Artificial Sequence
  Synthetic polynucleotide
gtaatacgactcactataggctcactttaacacaacttcaccatcctgaacggatggtgaacaccatctacagtacgtgtagatggtaccctacacaccccgggggtgtgtaggataaccacctccagtgaaggatacgagatgctagtg

SEQ ID NO: 696 - DNA, 150 bp, Artificial Sequence
  Synthetic polynucleotide
gtaatacgactcactataggctcacttccaacaattcctcaccacctcaccggtggtgaggcaccttacctctcctactacataggagaggtataccccacaccacctctgtggtggtgtggaccaagtgaaggatacgagatgctagtg

SEQ ID NO: 697 - DNA, 150 bp, Artificial Sequence
  Synthetic polynucleotide
gtaatacgactcactataggctcactccaataaccacatccaccaatcactccacctcgcgggtggagtgatacccctaatcaccccgggggtgattaggacctccacctcccctcgaggtggaggagtgaaggatacgagatgctagtg

SEQ ID NO: 698 - DNA, 150 bp, Artificial Sequence
  Synthetic polynucleotide
gtaatacgactcactataggctcactacctctcctacaccactccaaaagtggtgtagttctaacttctctactgcaagtagagaagttacaatccattctacccagggtagaatggacctacctaagtgaaggatacgagatgctagtg

SEQ ID NO: 699 - DNA, 150 bp, Artificial Sequence
  Synthetic polynucleotide
gtaatacgactcactataggctcactattcctctaccacttcccaaaagtggtagaaattccatccacctctcccccatggagaggtggccaactctccacctccacgcatcgtggaggtggaccaagtgaaggatacgagatgctagtg

SEQ ID NO: 700 - DNA, 150 bp, Artificial Sequence
  Synthetic polynucleotide
gtaatacgactcactataggctcactcattattcacattctcgaccagaatgtgaacttacctccacagctggtggaggtaattcaacttcttccccacacctcccgcgaggaggtgtggaactccagtgaaggatacgagatgctagtg

SEQ ID NO: 701 - DNA, 150 bp, Artificial Sequence
  Synthetic polynucleotide
gtaatacgactcactataggctcactcattataacaccccgagggtgttataattcctcacctccatctatcctctgcccgaggatagatacctcttacttacacttccttcatataaggaagtgtagtgaaggatacgagatgctagtg

SEQ ID NO: 702 - DNA, 150 bp, Artificial Sequence
  Synthetic polynucleotide
gtaatacgactcactataggctcactcctctaactcccgtggggagttagagccactcctccccaatggaggagtggctcatccttccatcctccccgagaggatggaaacaactaactattctcaagtgaaggatacgagatgctagtg

SEQ ID NO: 703 - DNA, 150 bp, Artificial Sequence
  Synthetic polynucleotide
gtaatacgactcactataggctcacttccatactcactcagcccgtgagtgagtattctcctccacctctacaggaggtggaggtccaccttacctctcatcctaaccatcacggttaggatgaccagtgaaggatacgagatgctagtg

SEQ ID NO: 704 - DNA, 150 bp, Artificial Sequence
  Synthetic polynucleotide
gtaatacgactcactataggctcactaacttctataacctcaattaggttatagaatactctccttctcacccatcaggtgagaaggcccacctccacacgctgtggaggtggaaccaccaacaccagtgaaggatacgagatgctagtg

SEQ ID NO: 705 - DNA, 150 bp, Artificial Sequence
  Synthetic polynucleotide
gtaatacgactcactataggctcactcattcctaacactctcaccatttgctggtgagagtcaaccacctccactgggccagtggaggtgcattccttacatcatcatccgctaaggatgatgatcagtgaaggatacgagatgctagtg

SEQ ID NO: 706 - DNA, 150 bp, Artificial Sequence
  Synthetic polynucleotide
gtaatacgactcactataggctcacttaaccttccatccccctgatggaaggtcctctccacccgcagggtggagaggactattccacataccaaccttccaaccacgctctgtggttggaatccaagtgaaggatacgagatgctagtg

SEQ ID NO: 707 - DNA, 150 bp, Artificial Sequence
  Synthetic polynucleotide
gtaatacgactcactataggctcactacctcaccattattccacgagctggaataatgtcctcctctcacctccgatcgaggtgagagcttattctcaatatatcccagccggatatattgcttacagtgaaggatacgagatgctagtg

SEQ ID NO: 708 - DNA, 150 bp, Artificial Sequence
  Synthetic polynucleotide
gtaatacgactcactataggctcactttacaaacctactccagcaaggagtaggttaccatacccttcatccacacggtgtggatgaagaacaaccattccaatctcacatcggtgatgtgagattagtgaaggatacgagatgctagtg

SEQ ID NO: 709 - DNA, 150 bp, Artificial Sequence
  Synthetic polynucleotide
gtaatacgactcactataggctcacttctacacctaccacctcctatctaattcccagcgggaattagatacctcaccaccggcccggtggtgaggacaccatacaccaagcgggtgtatggtttaagtgaaggatacgagatgctagtg

SEQ ID NO: 710 - DNA, 150 bp, Artificial Sequence
  Synthetic polynucleotide
gtaatacgactcactataggctcactactcaacttcataaactctatgaagttgcaacatccaccaatttcacacatcaattcatgatgtgtgacctaacctcatctacggctagtagatgaggcaagtgaaggatacgagatgctagtg

SEQ ID NO: 711 - DNA, 150 bp, Artificial Sequence
  Synthetic polynucleotide
gtaatacgactcactataggctcactcacctaacttctcaaagaagttaggtactccacaattacctcatccaccgtgcaggtggatgagcacctctcctctcttccaacctttggaagagagcatagtgaaggatacgagatgctagtg

SEQ ID NO: 712 - DNA, 150 bp, Artificial Sequence
  Synthetic polynucleotide
gtaatacgactcactataggctcactcattctacactctctattagagtgtagactccactccactgccagtggagtggaaactctatataccgctctggtatatagacacctcaccaccatatacagtgaaggatacgagatgctagtg

SEQ ID NO: 713 - DNA, 150 bp, Artificial Sequence
  Synthetic polynucleotide
gtaatacgactcactataggctcactaataccatccttacaaccaccttgtaaggatattcctccaaccaacctcattaaggttggttgtcctcaatcttcctaaccacccatagtggttaggacaagtgaaggatacgagatgctagtg

SEQ ID NO: 714 - DNA, 150 bp, Artificial Sequence
  Synthetic polynucleotide
gtaatacgactcactataggctcactctactacctcccgtgaggaggtagtaaatacaccttctcctttcgggagaaggtgccacatcactcctcctccacggaggagtgacctacctcttacttcagtgaaggatacgagatgctagtg

SEQ ID NO: 715 - DNA, 150 bp, Artificial Sequence
  Synthetic polynucleotide
gtaatacgactcactataggctcactcttaccttaaccacaacggttaaggtaactcacatccacccgaagggtggatgtgtacctcctaacacatatccactcctcctacgcggaggagtggcacagtgaaggatacgagatgctagtg

SEQ ID NO: 716 - DNA, 150 bp, Artificial Sequence
  Synthetic polynucleotide
gtaatacgactcactataggctcactacactctccaccccttgtggagagtgcttacctcctagatactaggaggtaatcatcctcctacctccactctcatcctactctaggatgagagtaaccaagtgaaggatacgagatgctagtg

SEQ ID NO: 717 - DNA, 150 bp, Artificial Sequence
  Synthetic polynucleotide
gtaatacgactcactataggctcactctctacctaccacctccgcttaggaggtggtatcaaccaacctccatccttcctcaacggaaggatggccttacttactgccgcagtaagtaagattcctagtgaaggatacgagatgctagtg

SEQ ID NO: 718 - DNA, 150 bp, Artificial Sequence
  Synthetic polynucleotide
gtaatacgactcactataggctcactacccactccaccttgtcggtggagtggatatcaaccactcttccaccatgtcggtggaagagaccacttcaatcatccccacaggatgattgaccactcaagtgaaggatacgagatgctagtg

SEQ ID NO: 719 - DNA, 150 bp, Artificial Sequence
  Synthetic polynucleotide
gtaatacgactcactataggctcactcttctcttacttactaccagtcgtagtaagtaaaacttcaacaccactggtgttgaagtcattacctccccctcggaggtaatgctaccacaacctcataagtgaaggatacgagatgctagtg

SEQ ID NO: 720 - DNA, 150 bp, Artificial Sequence
  Synthetic polynucleotide
gtaatacgactcactataggctcacttattaaccaatctccacctccttacctcccctctggaggtaaggccttctccacaaccattgtggagaagcaaccctataacttccacctgaagttatagagtgaaggatacgagatgctagtg

SEQ ID NO: 721 - DNA, 150 bp, Artificial Sequence
  Synthetic polynucleotide
gtaatacgactcactataggctcactcatactacctcccaatcaccacccctagtggtgattgcaccacctccagtccggaggtggtgtatccaatactctccacaacatcacatgttgtggagccagtgaaggatacgagatgctagtg

SEQ ID NO: 722 - DNA, 150 bp, Artificial Sequence
  Synthetic polynucleotide
gtaatacgactcactataggctcactcacaacccatcctccactggctggaggatggcataccactcctcattcataccttacttctcgtaaggtatgcctccacctccgctggggaggtggagaaagtgaaggatacgagatgctagtg

SEQ ID NO: 723 - DNA, 150 bp, Artificial Sequence
  Synthetic polynucleotide
gtaatacgactcactataggctcactaacaatcaacattcaccacctcccgaacggaggtggtgcaccacatcacaagacgtgatgtggtcaactcttactccacgcgggagtaagagcaaccaccagtgaaggatacgagatgctagtg

SEQ ID NO: 724 - DNA, 150 bp, Artificial Sequence
  Synthetic polynucleotide
gtaatacgactcactataggctcacttctctccttccaccgtcagtggaaggagaatccactcaaccttaacattcccaaggaatgttaagctccacctcaccaccaaaccggtggtgaggtctccagtgaaggatacgagatgctagtg

SEQ ID NO: 725 - DNA, 150 bp, Artificial Sequence
  Synthetic polynucleotide
gtaatacgactcactataggctcactccttcataattcactcaccgtgaattatgatccactccactcaccatacacccggtatggtgagccatacatacactccccaagtgtatgtatattattcagtgaaggatacgagatgctagtg

SEQ ID NO: 726 - DNA, 150 bp, Artificial Sequence
  Synthetic polynucleotide
gtaatacgactcactataggctcactttaccctcacaaccctccaggttgtgaggcataacccacctaccagaacgtggtaggtggcacacaacatccacaccaccttccttacacaggaaggtggagtgaaggatacgagatgctagtg

SEQ ID NO: 727 - DNA, 150 bp, Artificial Sequence
  Synthetic polynucleotide
gtaatacgactcactataggctcactaatcctcacctcctccatggaggtgaggcaaccaatccactcaacctccatcgacatgatggaggttcaccattaactcttctgttcgaagagttaattcagtgaaggatacgagatgctagtg

SEQ ID NO: 728 - DNA, 150 bp, Artificial Sequence
  Synthetic polynucleotide
gtaatacgactcactataggctcactactacctaacaataaacaattgttaggtcaattcattcttccatacttgatggaagaatcaatctcatttacaatccacgtccggtggattgtactccacagtgaaggatacgagatgctagtg

SEQ ID NO: 729 - DNA, 150 bp, Artificial Sequence
  Synthetic polynucleotide
gtaatacgactcactataggctcactctcactacaactaattctgcacgaattagttgttccaattctccaacatggcgttggagaatacactcctccatccgttggaggagtgttcctaaccacaagtgaaggatacgagatgctagtg

SEQ ID NO: 730 - DNA, 150 bp, Artificial Sequence
  Synthetic polynucleotide
gtaatacgactcactataggctcacttcacatccatctcattcctcatgagatggaaccaactcaccactcctccccgccggaggagtggacaaccaacacactccactgggtggagtgtgttatcagtgaaggatacgagatgctagtg

SEQ ID NO: 731 - DNA, 150 bp, Artificial Sequence
  Synthetic polynucleotide
gtaatacgactcactataggctcactcctctaccacctaatactgttaggtggtacaactccacctcttcctgaggtggagttacacctaccaatactccactccccacgggagtggagtatactaagtgaaggatacgagatgctagtg

SEQ ID NO: 732 - DNA, 150 bp, Artificial Sequence
  Synthetic polynucleotide
gtaatacgactcactataggctcactcctcatcatcaacaccaaccaaccaaacaacttggttggtttcttcatcctactcccagggagtaggatgatccctacatccagcctttggatgtaggtaagtgaaggatacgagatgctagtg

SEQ ID NO: 733 - DNA, 150 bp, Artificial Sequence
  Synthetic polynucleotide
gtaatacgactcactataggctcactcttacctccttcgatccgaaggaggtaacttaatcacaacaagtgtgattaagctacctctccacctccacgcgggaggtggagtaccaactcatccaacagtgaaggatacgagatgctagtg

SEQ ID NO: 734 - DNA, 150 bp, Artificial Sequence
  Synthetic polynucleotide
gtaatacgactcactataggctcacttattcacctctccaccacttcggtggagaggctcaatcaacctcctatccaccaaccgcacgggttggtggaacaccaactatcgacccgatagttggtcagtgaaggatacgagatgctagtg

SEQ ID NO: 735 - DNA, 150 bp, Artificial Sequence
  Synthetic polynucleotide
gtaatacgactcactataggctcactttatctccattctctcacctatacggtgagagaattccaacccatcctcattaaccatgaggatggacctcacatcaacctgcaacaggttgatgtcaacagtgaaggatacgagatgctagtg

SEQ ID NO: 736 - DNA, 150 bp, Artificial Sequence
  Synthetic polynucleotide
gtaatacgactcactataggctcacttcttccaccatataaccacgccttggttatatgaacctcttacatacactcagacagtgtatgtacaccttattttccacctaaccactttaggtggaacagtgaaggatacgagatgctagtg

SEQ ID NO: 737 - DNA, 150 bp, Artificial Sequence
  Synthetic polynucleotide
gtaatacgactcactataggctcactctccaacacctacaataacttacttcccgtggaagtaagtttcactcctcctacgtctggtaggaggagattcttccaccacctcggtggaagaatccacagtgaaggatacgagatgctagtg

SEQ ID NO: 738 - DNA, 150 bp, Artificial Sequence
  Synthetic polynucleotide
gtaatacgactcactataggctcactccaactccacctccacaacggaggtggagtactacctcctacacggtgtaggaggtatccatacatcttctcaccttaccccaaggtgagaaatcctaacagtgaaggatacgagatgctagtg

SEQ ID NO: 739 - DNA, 150 bp, Artificial Sequence
  Synthetic polynucleotide
gtaatacgactcactataggctcactcattccacctcctgctaggaggtggaacaatcacaacttctggttgtgattgcatcctccaatccacctattacagcccatgtaataggtataccattccagtgaaggatacgagatgctagtg

SEQ ID NO: 740 - DNA, 150 bp, Artificial Sequence
  Synthetic polynucleotide
gtaatacgactcactataggctcacttcctctcttcctgccagaggaagagagtacacacctccaccaccacctctccgattcggagaggtggttaccacaccttctaacaacatgttagaaggtaagtgaaggatacgagatgctagtg

SEQ ID NO: 741 - DNA, 150 bp, Artificial Sequence
  Synthetic polynucleotide
gtaatacgactcactataggctcacttaattccacacccgtgtggtgtggaatcacaatctcactacctgtgagattgtcaccaatccaatcaacattcctataatccaccagccgtggattatatagtgaaggatacgagatgctagtg

SEQ ID NO: 742 - DNA, 150 bp, Artificial Sequence
  Synthetic polynucleotide
gtaatacgactcactataggctcactactaatcacacaccaccccccaggtggtgtgtattctcctaccatccaacgacattggatggtaaattcatccttacctactaaggatgaaccaccatcaagtgaaggatacgagatgctagtg

SEQ ID NO: 743 - DNA, 150 bp, Artificial Sequence
  Synthetic polynucleotide
gtaatacgactcactataggctcactatccacattccaacccactccactcctatagagtggagtgtacacacctcatctcccatagatgaggtgtctcaaccaaccagcctctggttggttgatcagtgaaggatacgagatgctagtg

SEQ ID NO: 744 - DNA, 150 bp, Artificial Sequence
  Synthetic polynucleotide
gtaatacgactcactataggctcactacaacaacctcttaacctcctaagacgtaggaggttactcctccaccccaacggtggaggagccatctctccttcacattgaaggagagaccatactaccagtgaaggatacgagatgctagtg

SEQ ID NO: 745 - DNA, 150 bp, Artificial Sequence
  Synthetic polynucleotide
gtaatacgactcactataggctcactctcacctcataacccggttatgaggtgcatatatcccactccactctcatggagtggagtgaccaatacctccaaccaatccgcggcggattggttgcacagtgaaggatacgagatgctagtg

SEQ ID NO: 746 - DNA, 150 bp, Artificial Sequence
  Synthetic polynucleotide
gtaatacgactcactataggctcactacccaatcctcaccccccgtgaggattgtaacttcctcctcaccttgcgtcaaggtgaggaaccataaatctataccacgccctggtatagatctcctccagtgaaggatacgagatgctagtg

SEQ ID NO: 747 - DNA, 150 bp, Artificial Sequence
  Synthetic polynucleotide
gtaatacgactcactataggctcactaatccattctacccggacggtagaatggtctatcaccacctctaacacacctattatcgataggtgtgtactttactccattcgttacgaatggagtaccagtgaaggatacgagatgctagtg

SEQ ID NO: 748 - DNA, 150 bp, Artificial Sequence
  Synthetic polynucleotide
gtaatacgactcactataggctcacttctctcaccacctcaccatacactggtgaggtgcaacacctcatacttcctatcccaggaagtatgacctcaccaccagcagctggtggtgagtctaccaagtgaaggatacgagatgctagtg

SEQ ID NO: 749 - DNA, 150 bp, Artificial Sequence
  Synthetic polynucleotide
gtaatacgactcactataggctcactattcctctcccacaccacctcacaggtggtgtggcaatccaatcatcacatcctcgagggatgtgatgattcaattctaccacgttatggtagaattcacagtgaaggatacgagatgctagtg

SEQ ID NO: 750 - DNA, 150 bp, Artificial Sequence
  Synthetic polynucleotide
gtaatacgactcactataggctcactttaaccacacctcctatggaggtgtggtccacttatatacctctccctgaggtatatacaaccaccaacacacccaattggtgtgttggcacaattctcaagtgaaggatacgagatgctagtg

SEQ ID NO: 751 - DNA, 150 bp, Artificial Sequence
  Synthetic polynucleotide
gtaatacgactcactataggctcactacttccccatctatatttcacatatagatggtcaccctacacacccactaggtgtgtaggctcaccaataaccacctccacctccccacaggaggtggagagtgaaggatacgagatgctagtg

SEQ ID NO: 752 - DNA, 150 bp, Artificial Sequence
  Synthetic polynucleotide
gtaatacgactcactataggctcactctctcctaatacacaacctcccagtaggaggttgtgcccatacatccagacgatggatgtatgtccttctccacctccacccgaggtggagaataccattagtgaaggatacgagatgctagtg

SEQ ID NO: 753 - DNA, 150 bp, Artificial Sequence
  Synthetic polynucleotide
gtaatacgactcactataggctcactcctcttccttaatcacacactcggtgtgattaatcttaccatcattataccttgtccaggtataatgaatcactattcttcacattggctatgtgaagaaagtgaaggatacgagatgctagtg

SEQ ID NO: 754 - DNA, 150 bp, Artificial Sequence
  Synthetic polynucleotide
gtaatacgactcactataggctcacttaataccttactctccgatagagtaaggtttccaccttccggcaaggaaggtggactacctccaccacaccacccctctggtggtgtggccaattccaccagtgaaggatacgagatgctagtg

SEQ ID NO: 755 - DNA, 150 bp, Artificial Sequence
  Synthetic polynucleotide
gtaatacgactcactataggctcacttctactcaaacaataccacctgctggtattgttacacctccccacaccacctggtcggtggtgtggataataacaccacctcccactgggaggtggtgccagtgaaggatacgagatgctagtg

SEQ ID NO: 756 - DNA, 150 bp, Artificial Sequence
  Synthetic polynucleotide
gtaatacgactcactataggctcacttccaccaacttccacctcacccacgcggtgaggtggacattcaacttacaaccgggcgggttgtaagtacaactccatcttcttaggtcataagaagatgagtgaaggatacgagatgctagtg

SEQ ID NO: 757 - DNA, 150 bp, Artificial Sequence
  Synthetic polynucleotide
gtaatacgactcactataggctcacttatccctactccacaaccggtggagtaggatccaccaacacacctaacgtaggtgtgttgctcccactccaccggacaggtggagtggtccacattaccaagtgaaggatacgagatgctagtg

SEQ ID NO: 758 - DNA, 150 bp, Artificial Sequence
  Synthetic polynucleotide
gtaatacgactcactataggctcactattatctcctaaccagaccggttaggagataccaacctccctcacctccacgtcggaggtgaggcaccaattcttaccttggcaaggtaagaattactcaagtgaaggatacgagatgctagtg

SEQ ID NO: 759 - DNA, 150 bp, Artificial Sequence
  Synthetic polynucleotide
gtaatacgactcactataggctcactcacaactaacctcgaaaaggttagttgcatcctcaccacccatctggtggtgaggacttccctccacaccctcctggtgtggaggtcactctccaaccaaagtgaaggatacgagatgctagtg

SEQ ID NO: 760 - DNA, 150 bp, Artificial Sequence
  Synthetic polynucleotide
gtaatacgactcactataggctcacttttatccactatgccttagtggataacctccacattatataccttcacccggaaggtatatcaatccaccaaccctccacctcctcctgggaggtggagtagtgaaggatacgagatgctagtg

SEQ ID NO: 761 - DNA, 150 bp, Artificial Sequence
  Synthetic polynucleotide
gtaatacgactcactataggctcacttactccttctcctattcccctaataggagaaacatacttacctacttaacctaagccaggttaagtatctacctattctgtcacagaataggtactacacagtgaaggatacgagatgctagtg

SEQ ID NO: 762 - DNA, 150 bp, Artificial Sequence
  Synthetic polynucleotide
gtaatacgactcactataggctcactccacctcaccttaatctctacctccactcgttgtggaggtagaacctacctctaccgagggtagaggtagctcataactccttgatctaaggagttatacagtgaaggatacgagatgctagtg

SEQ ID NO: 763 - DNA, 150 bp, Artificial Sequence
  Synthetic polynucleotide
gtaatacgactcactataggctcactacaatccctctcctccccaagggaggagaggactcccctctcctccacggaggaggagaggacttattaaccttctcgtacagagaaggttaaactcaccagtgaaggatacgagatgctagtg

SEQ ID NO: 764 - DNA, 150 bp, Artificial Sequence
  Synthetic polynucleotide
gtaatacgactcactataggctcacttatccaacctctcaatcacaaccctcttgtgattgaaccttcaacatcctaacacaggatgttgatatcttacaccctccaccttaattcaaggtggaggagtgaaggatacgagatgctagtg

SEQ ID NO: 765 - DNA, 150 bp, Artificial Sequence
  Synthetic polynucleotide
gtaatacgactcactataggctcactcatactctacacttaccaccctccgggtggtaagttccacataccaacacgccctgttggtatgctcctcctacctcctgggtaggaggatcaactaatcagtgaaggatacgagatgctagtg

SEQ ID NO: 766 - DNA, 150 bp, Artificial Sequence
  Synthetic polynucleotide
gtaatacgactcactataggctcactcatctactaccaccactccttggtggtagtaccctctcctcctgccgggaggagaggcattccatcctcaatccatcctccgcatcggaggatggaccatagtgaaggatacgagatgctagtg

SEQ ID NO: 767 - DNA, 150 bp, Artificial Sequence
  Synthetic polynucleotide
gtaatacgactcactataggctcacttactcctccacctcgtctagaggtggaggaccatcctcctatatcatcaatctccacatcggagattgattatatcttccttagcttaaggaagatacacagtgaaggatacgagatgctagtg

SEQ ID NO: 768 - DNA, 150 bp, Artificial Sequence
  Synthetic polynucleotide
gtaatacgactcactataggctcactacattatcaactactcgttgataatgcacctccacctccacctcccaggtggaggtgaatctaaccttccaggaaggttagatccatacctactaccaacagtgaaggatacgagatgctagtg

SEQ ID NO: 769 - DNA, 150 bp, Artificial Sequence
  Synthetic polynucleotide
gtaatacgactcactataggctcactaaccattcctaacacaacatttgtgttaggacctccacctccggcagaggtggaggtctaaccacctcttgcaggtggttagcttcctctctaccaacatagtgaaggatacgagatgctagtg

SEQ ID NO: 770 - DNA, 150 bp, Artificial Sequence
  Synthetic polynucleotide
gtaatacgactcactataggctcactttctcaatcccactccaccgagtcggtggagtggtccacccctcctacctgccacaggtaggaggtcctaactccctacctatcaccccttgataggtagagtgaaggatacgagatgctagtg

SEQ ID NO: 771 - DNA, 150 bp, Artificial Sequence
  Synthetic polynucleotide
gtaatacgactcactataggctcactctatcatcattccacatgctggaatgatgtaccaccattcctatctcaattctcacaaggagaattgagcctccactcctggacggagtggaggaccaacagtgaaggatacgagatgctagtg

SEQ ID NO: 772 - DNA, 150 bp, Artificial Sequence
  Synthetic polynucleotide
gtaatacgactcactataggctcacttcccatctatccacccggtggatagatgtaccaccacattccatctcactaagatggaatgaccatctaaccaatcataccaatccccgagattggtatgagtgaaggatacgagatgctagtg

SEQ ID NO: 773 - DNA, 150 bp, Artificial Sequence
  Synthetic polynucleotide
gtaatacgactcactataggctcacttctcaccacctcctattcggaggtggtgatcactctcccactaccacacaacatgtggtagtgtcttccttcacccttgtggtgaaggaacatcaattccagtgaaggatacgagatgctagtg

SEQ ID NO: 774 - DNA, 150 bp, Artificial Sequence
  Synthetic polynucleotide
gtaatacgactcactataggctcactctacaccacttccactatcctctccgtgcgagaggatagtaacccctcacacctagcgcaggtgtgaggaaccattactcctccctgtcggaggagtaaaagtgaaggatacgagatgctagtg

SEQ ID NO: 775 - DNA, 150 bp, Artificial Sequence
  Synthetic polynucleotide
gtaatacgactcactataggctcactcactccccaccatccaaaccgtggatggtggtccacatacttcaacgtccggttgaagtatcataattcaactcaaagcgtgagttgaatacatcaacttagtgaaggatacgagatgctagtg

SEQ ID NO: 776 - DNA, 150 bp, Artificial Sequence
  Synthetic polynucleotide
gtaatacgactcactataggctcactctaataccacactccatgtggtattaattaactctcataagtgctatgagagttcatacccctcaccacccttaaggtggtgaggacctcctacattaccagtgaaggatacgagatgctagtg

SEQ ID NO: 777 - DNA, 150 bp, Artificial Sequence
  Synthetic polynucleotide
gtaatacgactcactataggctcactttaccacctctcaccggctgtgagaggtgttaaccacctctcttcctgacccaggaagagagcataccacctctcacctcccccgcggaggtgagaaaccagtgaaggatacgagatgctagtg

SEQ ID NO: 778 - DNA, 150 bp, Artificial Sequence
  Synthetic polynucleotide
gtaatacgactcactataggctcactactccttaccacttccttaactaccggttaaggaagctacctccacccagcgtggaggtagactatataacctccccccgggaggttatacctccttatcagtgaaggatacgagatgctagtg

SEQ ID NO: 779 - DNA, 150 bp, Artificial Sequence
  Synthetic polynucleotide
gtaatacgactcactataggctcactaccctccacctccggaagaggtggaggattcctcctcacctacctgtagtaggtgaggcacctacaactttctctcctcctgccaggaggagagaacttcagtgaaggatacgagatgctagtg

SEQ ID NO: 780 - DNA, 150 bp, Artificial Sequence
  Synthetic polynucleotide
gtaatacgactcactataggctcactaaccctctccaccgctcaggtggagaggtccacaccacccaaatggtggtgtggaattctctcctccaaccacacatatctcatttagatatgtgtaccaagtgaaggatacgagatgctagtg

SEQ ID NO: 781 - DNA, 150 bp, Artificial Sequence
  Synthetic polynucleotide
gtaatacgactcactataggctcactaaccaccaaccaaccaccatctgcaatggtggttgaccaccttaccacccgtaaggtggttccaaccacctctcctcccgacaggaggagaggcatatccagtgaaggatacgagatgctagtg

SEQ ID NO: 782 - DNA, 150 bp, Artificial Sequence
  Synthetic polynucleotide
gtaatacgactcactataggctcactactctcatctaattcatcttccactcgccgtggaagatgccttctaacatcctgcctggatgttagacctcttcaactctttcccagagttgaagtactcagtgaaggatacgagatgctagtg

SEQ ID NO: 783 - DNA, 150 bp, Artificial Sequence
  Synthetic polynucleotide
gtaatacgactcactataggctcactcaccaccaattacacatcttcccttaagatgtgtaaatccacctaaataactcctcacgcaggagttattccttcattcacgatacgtgaatgaagtaccagtgaaggatacgagatgctagtg

SEQ ID NO: 784 - DNA, 150 bp, Artificial Sequence
  Synthetic polynucleotide
gtaatacgactcactataggctcacttctcatctctccttcagtcaaggagagattactctccactcctccttctcggaggagtggccttatcttccaccaatccttctgacaaggattggtattcagtgaaggatacgagatgctagtg

SEQ ID NO: 785 - DNA, 150 bp, Artificial Sequence
  Synthetic polynucleotide
gtaatacgactcactataggctcactcttacaccacacctcctacaaggaggtgtggctcttcctcctccaccgtccaggtggaggagccctctcctcccctgaggaggagaggataccaccaactagtgaaggatacgagatgctagtg

SEQ ID NO: 786 - DNA, 150 bp, Artificial Sequence
  Synthetic polynucleotide
gtaatacgactcactataggctcactatcatactccaacctccttccgcgacggaaggaggtactccatctcctccacacgccgtggaggagaattcctccaccacctccgcccaggaggtggtgcagtgaaggatacgagatgctagtg

SEQ ID NO: 787 - DNA, 150 bp, Artificial Sequence
  Synthetic polynucleotide
gtaatacgactcactataggctcactacacaactattccactaaagcttagtggaatatccaactacacactcatatctctctgggagatatgagattcactcctcactccgtactggagtgaggaagtgaaggatacgagatgctagtg

SEQ ID NO: 788 - DNA, 150 bp, Artificial Sequence
  Synthetic polynucleotide
gtaatacgactcactataggctcactaatacaatacacacctcatcggtgtgtattacccatccacacccccgtggtgtggatgtccacctctccaacaccactccacccttctggtggagtggcaagtgaaggatacgagatgctagtg

SEQ ID NO: 789 - DNA, 150 bp, Artificial Sequence
  Synthetic polynucleotide
gtaatacgactcactataggctcactcttctcacttcaccccgaagtgagaaaactactaacatatcatcaaccgttagttgatgataacttctccacaacaccaccttcctagggaaggtggtgcagtgaaggatacgagatgctagtg

SEQ ID NO: 790 - DNA, 150 bp, Artificial Sequence
  Synthetic polynucleotide
gtaatacgactcactataggctcactccctacacactcatccagtgtgtaggcataactaatcactcaacacctctgcccgaggtgttgactctctacatctccaaccccattggagatgttccatagtgaaggatacgagatgctagtg

SEQ ID NO: 791 - DNA, 150 bp, Artificial Sequence
  Synthetic polynucleotide
gtaatacgactcactataggctcactatccaccacacctcaaccggaggtgtggtaattatcttccttcaccccggtggtgaaggaataccaactccttacttatcacctaccgtgataagtaaccagtgaaggatacgagatgctagtg

SEQ ID NO: 792 - DNA, 150 bp, Artificial Sequence
  Synthetic polynucleotide
gtaatacgactcactataggctcacttccacaccaaccacccgttggtgtggatactcatccaccacttaggtggatgagtacaccacttaacaaccaacactaccctagtgttggttcaacctccagtgaaggatacgagatgctagtg

SEQ ID NO: 793 - DNA, 150 bp, Artificial Sequence
  Synthetic polynucleotide
gtaatacgactcactataggctcactctcaccactcactcctacctacgctataggtaggagtcctctccaccccagaggtggagaggactatcatcatccttattcaggatgatgaacaccactcagtgaaggatacgagatgctagtg

SEQ ID NO: 794 - DNA, 150 bp, Artificial Sequence
  Synthetic polynucleotide
gtaatacgactcactataggctcactcatctattctatcctcaattaggatagaatccactaccaccacctccagcctggaggtggtgcaacaaccctcctcctacaccacgtaggaggagtatccagtgaaggatacgagatgctagtg

SEQ ID NO: 795 - DNA, 150 bp, Artificial Sequence
  Synthetic polynucleotide
gtaatacgactcactataggctcacttactcctccacctgtacggtggaggagcatactaacctctaatttgcaattagaggttctcctccacctctaacttaaccaatccttggttaagttcattagtgaaggatacgagatgctagtg

SEQ ID NO: 796 - DNA, 150 bp, Artificial Sequence
  Synthetic polynucleotide
gtaatacgactcactataggctcactccactacctccttctctcatggagaaggaggtcctctcctcctcgcaggaggagaggaattccaccaaagcatggtggaattcaaccatcattccacaacagtgaaggatacgagatgctagtg

SEQ ID NO: 797 - DNA, 150 bp, Artificial Sequence
  Synthetic polynucleotide
gtaatacgactcactataggctcactcatttctcttcacctcattggtgaagagaaaccaaccaccacctccacccaacaggtggaggtgataacactacaatctctgtagtgttattcctcacatagtgaaggatacgagatgctagtg

SEQ ID NO: 798 - DNA, 150 bp, Artificial Sequence
  Synthetic polynucleotide
gtaatacgactcactataggctcactccacaataactcttctacaggaagagttattaacaacacacctaacagaacttgttaggtgtcacctctccaacatctcctcatcacccatgaggagattagtgaaggatacgagatgctagtg

SEQ ID NO: 799 - DNA, 150 bp, Artificial Sequence
  Synthetic polynucleotide
gtaatacgactcactataggctcactatccaccttccaaccgctggaaggtggatctccaccaactacactcttcaatccgaagagtgtacttatccttcatcggctgaaggataaaccaataaccagtgaaggatacgagatgctagtg

SEQ ID NO: 800 - DNA, 150 bp, Artificial Sequence
  Synthetic polynucleotide
gtaatacgactcactataggctcactccctctcctcccaaaaggaggagaggaacttccactcacaccacaatcattcccagctggaatgattgcttcatcaaccccgcgggttgatgaacatataagtgaaggatacgagatgctagtg

SEQ ID NO: 801 - DNA, 150 bp, Artificial Sequence
  Synthetic polynucleotide
gtaatacgactcactataggctcacttcctcttcctccccgaaggaggaagagatattccacaacctctccttccgagcaggaaggagagcacatactcacccagccggtgagtatgccaatacctagtgaaggatacgagatgctagtg

SEQ ID NO: 802 - DNA, 150 bp, Artificial Sequence
  Synthetic polynucleotide
gtaatacgactcactataggctcactctaactcataacaccagatgtgttatgagtaatccaacaccacctctcctcccggcaggaggagaggcctactccattcatcaacactgggttgatgaatagtgaaggatacgagatgctagtg

SEQ ID NO: 803 - DNA, 150 bp, Artificial Sequence
  Synthetic polynucleotide
gtaatacgactcactataggctcactaaccaacacaccaacgccgcgttggtgtgtcctctacccacctatctcctcgcgagataggtgcctcactcaaccaagttgagtgaggacctccaatcttagtgaaggatacgagatgctagtg

SEQ ID NO: 804 - DNA, 150 bp, Artificial Sequence
  Synthetic polynucleotide
gtaatacgactcactataggctcactttcctcacctccttgctggaggtgaggcaacttcacattctacgagaatgtgaagcacatctcaccttactcctgtagtaaggtgactctcctaccaaccagtgaaggatacgagatgctagtg

SEQ ID NO: 805 - DNA, 150 bp, Artificial Sequence
  Synthetic polynucleotide
gtaatacgactcactataggctcactattccaccttccgcccgaaggtggaactacacctcttcctcatcctatcctacaataggataggatatcactccactccactatctggagtggagattccagtgaaggatacgagatgctagtg

SEQ ID NO: 806 - DNA, 150 bp, Artificial Sequence
  Synthetic polynucleotide
gtaatacgactcactataggctcactactccactcatcatccacccactggatgatgacaaccttaacacctcttctcgacgaagaggtgtcataccctcaccatccttctcggatggtgagaccaagtgaaggatacgagatgctagtg

SEQ ID NO: 807 - DNA, 150 bp, Artificial Sequence
  Synthetic polynucleotide
gtaatacgactcactataggctcactccattcaactaccaacgacgttggtagttgcctctctcctccacctccgcggtggaggagtcctcatcattctactatcttccattgatcatggaagataagtgaaggatacgagatgctagtg

SEQ ID NO: 808 - DNA, 150 bp, Artificial Sequence
  Synthetic polynucleotide
gtaatacgactcactataggctcactcctctctcaccaccaccccatggtggtgagccaccacctccacgtatcgtggaggtggatcctccatacctccacctacggcgtaggtggaggccatattagtgaaggatacgagatgctagtg

SEQ ID NO: 809 - DNA, 150 bp, Artificial Sequence
  Synthetic polynucleotide
gtaatacgactcactataggctcactactcacacctcaccacaccacctccccggtggtgtggaccacaacttaccagcttggtaagttgtccttccaactcggtgagttggaaggataccttaccagtgaaggatacgagatgctagtg

SEQ ID NO: 810 - DNA, 150 bp, Artificial Sequence
  Synthetic polynucleotide
gtaatacgactcactataggctcactactctaccatccattattccgccctggaataatggtcctcaatcttaccttccgcaggtaagattctcctccacctctcgttgaggtggaggaattccatagtgaaggatacgagatgctagtg

SEQ ID NO: 811 - DNA, 150 bp, Artificial Sequence
  Synthetic polynucleotide
gtaatacgactcactataggctcactttcacaatctcttccacacgacgtggaagagacctcctaacaccatccaccttgccggtggatggtcaatttaatccaactcccaaagttggattacaacagtgaaggatacgagatgctagtg

SEQ ID NO: 812 - DNA, 150 bp, Artificial Sequence
  Synthetic polynucleotide
gtaatacgactcactataggctcactatcaacaactcctccacctccggggtggaggagtccaccaacctccacctccgaccgaggtggaggtaccacaaccagatcctggttgtggtctacctccagtgaaggatacgagatgctagtg

SEQ ID NO: 813 - DNA, 150 bp, Artificial Sequence
  Synthetic polynucleotide
gtaatacgactcactataggctcactaattactcattacgagtcgtaatgagtacatactcctctcctccctcagggaggagaggcaacctctatcacctaactagattaggtgatattacctccaagtgaaggatacgagatgctagtg

SEQ ID NO: 814 - DNA, 150 bp, Artificial Sequence
  Synthetic polynucleotide
gtaatacgactcactataggctcactaccaccaacacctccttccttcaaggaaggaggttctaccaatcacactacttatattctaagtagtgttcacctattccttaggcaggaataggtcaacagtgaaggatacgagatgctagtg

SEQ ID NO: 815 - DNA, 150 bp, Artificial Sequence
  Synthetic polynucleotide
gtaatacgactcactataggctcactttccactcctagcatataggagtggactaccactaactaaccacaatcttacctaaatcctaggtaagataccattcactaactatgcattagttagtgaagtgaaggatacgagatgctagtg

SEQ ID NO: 816 - DNA, 150 bp, Artificial Sequence
  Synthetic polynucleotide
gtaatacgactcactataggctcactcctactcctccgggccggaggagtagattctccacataaccacctcctccaaccacactaggtggttggagccctctccacccggtgggtggagaggactagtgaaggatacgagatgctagtg

SEQ ID NO: 817 - DNA, 150 bp, Artificial Sequence
  Synthetic polynucleotide
gtaatacgactcactataggctcacttccattcctcctgttgcaggaggaatgaataacctctcctccccttgggaggagaggcctccaacctcatttaacacttccccagaggaagtgttaacacagtgaaggatacgagatgctagtg

SEQ ID NO: 818 - DNA, 150 bp, Artificial Sequence
  Synthetic polynucleotide
gtaatacgactcactataggctcactacttatcaaacttacatcactcagatgtaagttcctaccccatccacctgagcaaggtggatggttactaattcaaccagcacggttgaattacatctacagtgaaggatacgagatgctagtg

SEQ ID NO: 819 - DNA, 150 bp, Artificial Sequence
  Synthetic polynucleotide
gtaatacgactcactataggctcactcctcacctcaataccaccgagccggtggtattgctctccacctctcctctcgagaggtggactatctccttccacggcgcgtggaaggagtaacctccatagtgaaggatacgagatgctagtg

SEQ ID NO: 820 - DNA, 150 bp, Artificial Sequence
  Synthetic polynucleotide
gtaatacgactcactataggctcactactaatccaccatccctccacctcaccccgaggtggaggtatctccaaccaaccctaagggttggttggaccattatcaactcagtgtctgagttgatacagtgaaggatacgagatgctagtg

SEQ ID NO: 821 - DNA, 150 bp, Artificial Sequence
  Synthetic polynucleotide
gtaatacgactcactataggctcactcttaccacaccaccctatcggtggtgtggatccaaccatttaccaaccaccgggggtggttggtactcctccctatcatcccccccggatgataggcaccagtgaaggatacgagatgctagtg

SEQ ID NO: 822 - DNA, 150 bp, Artificial Sequence
  Synthetic polynucleotide
gtaatacgactcactataggctcacttcatatccactctccacctcatataggtggagagttcctccaccaacatctcaacctccgcaccggaggttgagccttcctcctacggactaggaggaagagtgaaggatacgagatgctagtg

SEQ ID NO: 823 - DNA, 150 bp, Artificial Sequence
  Synthetic polynucleotide
gtaatacgactcactataggctcacttatataaccacctcattcaactccgctcgagttgaatgccctacaccacggccagtggtgtaggaccaacctcttctccacctcctacgcggaggtggagagtgaaggatacgagatgctagtg

SEQ ID NO: 824 - DNA, 150 bp, Artificial Sequence
  Synthetic polynucleotide
gtaatacgactcactataggctcactacacaaatcatacctgagcaaggtatgattccacccatctacctcatcgcgaggtagatgtcttaccatatcaactcaacacctgctgggtgttgagttaagtgaaggatacgagatgctagtg

SEQ ID NO: 825 - DNA, 150 bp, Artificial Sequence
  Synthetic polynucleotide
gtaatacgactcactataggctcactcccttcttacttcactagtaagaaggcttacaccaaccatcattactctctatcatcttctgatagagagacctctcctaccacaccgcgtggtaggagaagtgaaggatacgagatgctagtg

SEQ ID NO: 826 - DNA, 150 bp, Artificial Sequence
  Synthetic polynucleotide
gtaatacgactcactataggctcacttcacaactcttcctacctccttacgaggtaggaacaacatataatcctcactcggtgaggattattccattctcactcctcctattccctaggaggagttagtgaaggatacgagatgctagtg

SEQ ID NO: 827 - DNA, 150 bp, Artificial Sequence
  Synthetic polynucleotide
gtaatacgactcactataggctcactacactatatccagcagctggatatagtcaatctcctccaactcaccacctcctttccggaggtggtgcctccacaccaccacgggggtggtgtggcatacagtgaaggatacgagatgctagtg

SEQ ID NO: 828 - DNA, 150 bp, Artificial Sequence
  Synthetic polynucleotide
gtaatacgactcactataggctcacttcctagctattaatgctatggcagttaccatacctaggtggctaggttgttgcattaatagctaggaaacaagtgtctcagtctcaacctagccacctagagtgaaggatacgagatgctagtg

SEQ ID NO: 829 - DNA, 150 bp, Artificial Sequence
  Synthetic polynucleotide
gtaatacgactcactataggctcacttcctagctattaatgctatggcagttaccatacgatgccaagttagattttgcattaatagctaggaaacaagtgtctcagtctaatctaacttggcatcagtgaaggatacgagatgctagtg

SEQ ID NO: 830 - DNA, 150 bp, Artificial Sequence
  Synthetic polynucleotide
gtaatacgactcactataggctcacttcctagctattaatgctatggcagttaccatacgaatgaattgccagaattgcattaatagctaggaaacaagtgtctcagtctttctggcaattcattcagtgaaggatacgagatgctagtg

SEQ ID NO: 831 - DNA, 150 bp, Artificial Sequence
  Synthetic polynucleotide
gtaatacgactcactataggctcacttcctagctattaatgctatggcagttaccatactcacgcaaggacacacttgcattaatagctaggaaacaagtgtctcagtctgtgtgtccttgcgtgaagtgaaggatacgagatgctagtg

SEQ ID NO: 832 - DNA, 150 bp, Artificial Sequence
  Synthetic polynucleotide
gtaatacgactcactataggctcacttcctagctattaatgctatggcagttaccatacttatcgcatacggcatttgcattaatagctaggaaacaagtgtctcagtctatgccgtatgcgataaagtgaaggatacgagatgctagtg

SEQ ID NO: 833 - DNA, 150 bp, Artificial Sequence
  Synthetic polynucleotide
gtaatacgactcactataggctcacttcctagctattaatgctatggcagttaccatacctgacgcatatcggccttgcattaatagctaggaaacaagtgtctcagtctggccgatatgcgtcagagtgaaggatacgagatgctagtg

SEQ ID NO: 834 - DNA, 150 bp, Artificial Sequence
  Synthetic polynucleotide
gtaatacgactcactataggctcacttcctagctattaatgctatggcagttaccatacttgacgaggtgcaggcttgcattaatagctaggaaacaagtgtctcagtctgcctgcacctcgtcaaagtgaaggatacgagatgctagtg

SEQ ID NO: 835 - DNA, 150 bp, Artificial Sequence
  Synthetic polynucleotide
gtaatacgactcactataggctcacttcctagctattaatgctatggcagttaccatacagtaacaacctacagcttgcattaatagctaggaaacaagtgtctcagtctgctgtaggttgttactagtgaaggatacgagatgctagtg

SEQ ID NO: 836 - DNA, 150 bp, Artificial Sequence
  Synthetic polynucleotide
gtaatacgactcactataggctcactctaaggaacatagttgtatggcagttaccatacctaggtggctaggttgttcaactatgttccttagaacaagtgtctcagtctcaacctagccacctagagtgaaggatacgagatgctagtg

SEQ ID NO: 837 - DNA, 150 bp, Artificial Sequence
  Synthetic polynucleotide
gtaatacgactcactataggctcactctaaggaacatagttgtatggcagttaccatacgatgccaagttagattttcaactatgttccttagaacaagtgtctcagtctaatctaacttggcatcagtgaaggatacgagatgctagtg

SEQ ID NO: 838 - DNA, 150 bp, Artificial Sequence
  Synthetic polynucleotide
gtaatacgactcactataggctcactctaaggaacatagttgtatggcagttaccatacgaatgaattgccagaattcaactatgttccttagaacaagtgtctcagtctttctggcaattcattcagtgaaggatacgagatgctagtg

SEQ ID NO: 839 - DNA, 150 bp, Artificial Sequence
  Synthetic polynucleotide
gtaatacgactcactataggctcactctaaggaacatagttgtatggcagttaccatactcacgcaaggacacacttcaactatgttccttagaacaagtgtctcagtctgtgtgtccttgcgtgaagtgaaggatacgagatgctagtg

SEQ ID NO: 840 - DNA, 150 bp, Artificial Sequence
  Synthetic polynucleotide
gtaatacgactcactataggctcactctaaggaacatagttgtatggcagttaccatacttatcgcatacggcatttcaactatgttccttagaacaagtgtctcagtctatgccgtatgcgataaagtgaaggatacgagatgctagtg

SEQ ID NO: 841 - DNA, 150 bp, Artificial Sequence
  Synthetic polynucleotide
gtaatacgactcactataggctcactctaaggaacatagttgtatggcagttaccatacctgacgcatatcggccttcaactatgttccttagaacaagtgtctcagtctggccgatatgcgtcagagtgaaggatacgagatgctagtg

SEQ ID NO: 842 - DNA, 150 bp, Artificial Sequence
  Synthetic polynucleotide
gtaatacgactcactataggctcactctaaggaacatagttgtatggcagttaccatacttgacgaggtgcaggcttcaactatgttccttagaacaagtgtctcagtctgcctgcacctcgtcaaagtgaaggatacgagatgctagtg

SEQ ID NO: 843 - DNA, 150 bp, Artificial Sequence
  Synthetic polynucleotide
gtaatacgactcactataggctcactctaaggaacatagttgtatggcagttaccatacagtaacaacctacagcttcaactatgttccttagaacaagtgtctcagtctgctgtaggttgttactagtgaaggatacgagatgctagtg

SEQ ID NO: 844 - DNA, 150 bp, Artificial Sequence
  Synthetic polynucleotide
gtaatacgactcactataggctcactgtgtatgatggcgttatatggcagttaccatacctaggtggctaggttgtttaacgccatcatacacaacaagtgtctcagtctcaacctagccacctagagtgaaggatacgagatgctagtg

SEQ ID NO: 845 - DNA, 150 bp, Artificial Sequence
  Synthetic polynucleotide
gtaatacgactcactataggctcactgtgtatgatggcgttatatggcagttaccatacgatgccaagttagatttttaacgccatcatacacaacaagtgtctcagtctaatctaacttggcatcagtgaaggatacgagatgctagtg

SEQ ID NO: 846 - DNA, 150 bp, Artificial Sequence
  Synthetic polynucleotide
gtaatacgactcactataggctcactgtgtatgatggcgttatatggcagttaccatacgaatgaattgccagaatttaacgccatcatacacaacaagtgtctcagtctttctggcaattcattcagtgaaggatacgagatgctagtg

SEQ ID NO: 847 - DNA, 150 bp, Artificial Sequence
  Synthetic polynucleotide
gtaatacgactcactataggctcactgtgtatgatggcgttatatggcagttaccatactcacgcaaggacacactttaacgccatcatacacaacaagtgtctcagtctgtgtgtccttgcgtgaagtgaaggatacgagatgctagtg

SEQ ID NO: 848 - DNA, 150 bp, Artificial Sequence
  Synthetic polynucleotide
gtaatacgactcactataggctcactgtgtatgatggcgttatatggcagttaccatacttatcgcatacggcattttaacgccatcatacacaacaagtgtctcagtctatgccgtatgcgataaagtgaaggatacgagatgctagtg

SEQ ID NO: 849 - DNA, 150 bp, Artificial Sequence
  Synthetic polynucleotide
gtaatacgactcactataggctcactgtgtatgatggcgttatatggcagttaccatacctgacgcatatcggcctttaacgccatcatacacaacaagtgtctcagtctggccgatatgcgtcagagtgaaggatacgagatgctagtg

SEQ ID NO: 850 - DNA, 150 bp, Artificial Sequence
  Synthetic polynucleotide
gtaatacgactcactataggctcactgtgtatgatggcgttatatggcagttaccatacttgacgaggtgcaggctttaacgccatcatacacaacaagtgtctcagtctgcctgcacctcgtcaaagtgaaggatacgagatgctagtg

SEQ ID NO: 851 - DNA, 150 bp, Artificial Sequence
  Synthetic polynucleotide
gtaatacgactcactataggctcactgtgtatgatggcgttatatggcagttaccatacagtaacaacctacagctttaacgccatcatacacaacaagtgtctcagtctgctgtaggttgttactagtgaaggatacgagatgctagtg

SEQ ID NO: 852 - DNA, 150 bp, Artificial Sequence
  Synthetic polynucleotide
gtaatacgactcactataggctcactatgctcaggtctgaattatggcagttaccatacctaggtggctaggttgttattcagacctgagcataacaagtgtctcagtctcaacctagccacctagagtgaaggatacgagatgctagtg

SEQ ID NO: 853 - DNA, 150 bp, Artificial Sequence
  Synthetic polynucleotide
gtaatacgactcactataggctcactatgctcaggtctgaattatggcagttaccatacgatgccaagttagattttattcagacctgagcataacaagtgtctcagtctaatctaacttggcatcagtgaaggatacgagatgctagtg

SEQ ID NO: 854 - DNA, 150 bp, Artificial Sequence
  Synthetic polynucleotide
gtaatacgactcactataggctcactatgctcaggtctgaattatggcagttaccatacgaatgaattgccagaattattcagacctgagcataacaagtgtctcagtctttctggcaattcattcagtgaaggatacgagatgctagtg

SEQ ID NO: 855 - DNA, 150 bp, Artificial Sequence
  Synthetic polynucleotide
gtaatacgactcactataggctcactatgctcaggtctgaattatggcagttaccatactcacgcaaggacacacttattcagacctgagcataacaagtgtctcagtctgtgtgtccttgcgtgaagtgaaggatacgagatgctagtg

SEQ ID NO: 856 - DNA, 150 bp, Artificial Sequence
  Synthetic polynucleotide
gtaatacgactcactataggctcactatgctcaggtctgaattatggcagttaccatacttatcgcatacggcatttattcagacctgagcataacaagtgtctcagtctatgccgtatgcgataaagtgaaggatacgagatgctagtg

SEQ ID NO: 857 - DNA, 150 bp, Artificial Sequence
  Synthetic polynucleotide
gtaatacgactcactataggctcactatgctcaggtctgaattatggcagttaccatacctgacgcatatcggccttattcagacctgagcataacaagtgtctcagtctggccgatatgcgtcagagtgaaggatacgagatgctagtg

SEQ ID NO: 858 - DNA, 150 bp, Artificial Sequence
  Synthetic polynucleotide
gtaatacgactcactataggctcactatgctcaggtctgaattatggcagttaccatacttgacgaggtgcaggcttattcagacctgagcataacaagtgtctcagtctgcctgcacctcgtcaaagtgaaggatacgagatgctagtg

SEQ ID NO: 859 - DNA, 150 bp, Artificial Sequence
  Synthetic polynucleotide
gtaatacgactcactataggctcactatgctcaggtctgaattatggcagttaccatacagtaacaacctacagcttattcagacctgagcataacaagtgtctcagtctgctgtaggttgttactagtgaaggatacgagatgctagtg

SEQ ID NO: 860 - DNA, 150 bp, Artificial Sequence
  Synthetic polynucleotide
gtaatacgactcactataggctcacttattggagcactgctctatggcagttaccatacctaggtggctaggttgttgagcagtgctccaataaacaagtgtctcagtctcaacctagccacctagagtgaaggatacgagatgctagtg

SEQ ID NO: 861 - DNA, 150 bp, Artificial Sequence
  Synthetic polynucleotide
gtaatacgactcactataggctcacttattggagcactgctctatggcagttaccatacgatgccaagttagattttgagcagtgctccaataaacaagtgtctcagtctaatctaacttggcatcagtgaaggatacgagatgctagtg

SEQ ID NO: 862 - DNA, 150 bp, Artificial Sequence
  Synthetic polynucleotide
gtaatacgactcactataggctcacttattggagcactgctctatggcagttaccatacgaatgaattgccagaattgagcagtgctccaataaacaagtgtctcagtctttctggcaattcattcagtgaaggatacgagatgctagtg

SEQ ID NO: 863 - DNA, 150 bp, Artificial Sequence
  Synthetic polynucleotide
gtaatacgactcactataggctcacttattggagcactgctctatggcagttaccatactcacgcaaggacacacttgagcagtgctccaataaacaagtgtctcagtctgtgtgtccttgcgtgaagtgaaggatacgagatgctagtg

SEQ ID NO: 864 - DNA, 150 bp, Artificial Sequence
  Synthetic polynucleotide
gtaatacgactcactataggctcacttattggagcactgctctatggcagttaccatacttatcgcatacggcatttgagcagtgctccaataaacaagtgtctcagtctatgccgtatgcgataaagtgaaggatacgagatgctagtg

SEQ ID NO: 865 - DNA, 150 bp, Artificial Sequence
  Synthetic polynucleotide
gtaatacgactcactataggctcacttattggagcactgctctatggcagttaccatacctgacgcatatcggccttgagcagtgctccaataaacaagtgtctcagtctggccgatatgcgtcagagtgaaggatacgagatgctagtg

SEQ ID NO: 866 - DNA, 150 bp, Artificial Sequence
  Synthetic polynucleotide
gtaatacgactcactataggctcacttattggagcactgctctatggcagttaccatacttgacgaggtgcaggcttgagcagtgctccaataaacaagtgtctcagtctgcctgcacctcgtcaaagtgaaggatacgagatgctagtg

SEQ ID NO: 867 - DNA, 150 bp, Artificial Sequence
  Synthetic polynucleotide
gtaatacgactcactataggctcacttattggagcactgctctatggcagttaccatacagtaacaacctacagcttgagcagtgctccaataaacaagtgtctcagtctgctgtaggttgttactagtgaaggatacgagatgctagtg

SEQ ID NO: 868 - DNA, 150 bp, Artificial Sequence
  Synthetic polynucleotide
gtaatacgactcactataggctcactgtcctcctatatgcgttatggcagttaccatacctaggtggctaggttgttacgcatataggaggacaacaagtgtctcagtctcaacctagccacctagagtgaaggatacgagatgctagtg

SEQ ID NO: 869 - DNA, 150 bp, Artificial Sequence
  Synthetic polynucleotide
gtaatacgactcactataggctcactgtcctcctatatgcgttatggcagttaccatacgatgccaagttagattttacgcatataggaggacaacaagtgtctcagtctaatctaacttggcatcagtgaaggatacgagatgctagtg

SEQ ID NO: 870 - DNA, 150 bp, Artificial Sequence
  Synthetic polynucleotide
gtaatacgactcactataggctcactgtcctcctatatgcgttatggcagttaccatacgaatgaattgccagaattacgcatataggaggacaacaagtgtctcagtctttctggcaattcattcagtgaaggatacgagatgctagtg

SEQ ID NO: 871 - DNA, 150 bp, Artificial Sequence
  Synthetic polynucleotide
gtaatacgactcactataggctcactgtcctcctatatgcgttatggcagttaccatactcacgcaaggacacacttacgcatataggaggacaacaagtgtctcagtctgtgtgtccttgcgtgaagtgaaggatacgagatgctagtg

SEQ ID NO: 872 - DNA, 150 bp, Artificial Sequence
  Synthetic polynucleotide
gtaatacgactcactataggctcactgtcctcctatatgcgttatggcagttaccatacttatcgcatacggcatttacgcatataggaggacaacaagtgtctcagtctatgccgtatgcgataaagtgaaggatacgagatgctagtg

SEQ ID NO: 873 - DNA, 150 bp, Artificial Sequence
  Synthetic polynucleotide
gtaatacgactcactataggctcactgtcctcctatatgcgttatggcagttaccatacctgacgcatatcggccttacgcatataggaggacaacaagtgtctcagtctggccgatatgcgtcagagtgaaggatacgagatgctagtg

SEQ ID NO: 874 - DNA, 150 bp, Artificial Sequence
  Synthetic polynucleotide
gtaatacgactcactataggctcactgtcctcctatatgcgttatggcagttaccatacttgacgaggtgcaggcttacgcatataggaggacaacaagtgtctcagtctgcctgcacctcgtcaaagtgaaggatacgagatgctagtg

SEQ ID NO: 875 - DNA, 150 bp, Artificial Sequence
  Synthetic polynucleotide
gtaatacgactcactataggctcactgtcctcctatatgcgttatggcagttaccatacagtaacaacctacagcttacgcatataggaggacaacaagtgtctcagtctgctgtaggttgttactagtgaaggatacgagatgctagtg

SEQ ID NO: 876 - DNA, 150 bp, Artificial Sequence
  Synthetic polynucleotide
gtaatacgactcactataggctcactctactcgcctcctgtgtatggcagttaccatacctaggtggctaggttgttcacaggaggcgagtagaacaagtgtctcagtctcaacctagccacctagagtgaaggatacgagatgctagtg

SEQ ID NO: 877 - DNA, 150 bp, Artificial Sequence
  Synthetic polynucleotide
gtaatacgactcactataggctcactctactcgcctcctgtgtatggcagttaccatacgatgccaagttagattttcacaggaggcgagtagaacaagtgtctcagtctaatctaacttggcatcagtgaaggatacgagatgctagtg

SEQ ID NO: 878 - DNA, 150 bp, Artificial Sequence
  Synthetic polynucleotide
gtaatacgactcactataggctcactctactcgcctcctgtgtatggcagttaccatacgaatgaattgccagaattcacaggaggcgagtagaacaagtgtctcagtctttctggcaattcattcagtgaaggatacgagatgctagtg

SEQ ID NO: 879 - DNA, 150 bp, Artificial Sequence
  Synthetic polynucleotide
gtaatacgactcactataggctcactctactcgcctcctgtgtatggcagttaccatactcacgcaaggacacacttcacaggaggcgagtagaacaagtgtctcagtctgtgtgtccttgcgtgaagtgaaggatacgagatgctagtg

SEQ ID NO: 880 - DNA, 150 bp, Artificial Sequence
  Synthetic polynucleotide
gtaatacgactcactataggctcactctactcgcctcctgtgtatggcagttaccatacttatcgcatacggcatttcacaggaggcgagtagaacaagtgtctcagtctatgccgtatgcgataaagtgaaggatacgagatgctagtg

SEQ ID NO: 881 - DNA, 150 bp, Artificial Sequence
  Synthetic polynucleotide
gtaatacgactcactataggctcactctactcgcctcctgtgtatggcagttaccatacctgacgcatatcggccttcacaggaggcgagtagaacaagtgtctcagtctggccgatatgcgtcagagtgaaggatacgagatgctagtg

SEQ ID NO: 882 - DNA, 150 bp, Artificial Sequence
  Synthetic polynucleotide
gtaatacgactcactataggctcactctactcgcctcctgtgtatggcagttaccatacttgacgaggtgcaggcttcacaggaggcgagtagaacaagtgtctcagtctgcctgcacctcgtcaaagtgaaggatacgagatgctagtg

SEQ ID NO: 883 - DNA, 150 bp, Artificial Sequence
  Synthetic polynucleotide
gtaatacgactcactataggctcactctactcgcctcctgtgtatggcagttaccatacagtaacaacctacagcttcacaggaggcgagtagaacaagtgtctcagtctgctgtaggttgttactagtgaaggatacgagatgctagtg

SEQ ID NO: 884 - DNA, 150 bp, Artificial Sequence
  Synthetic polynucleotide
gtaatacgactcactataggctcactctgacttcggatggcgtatggcagttaccatacctaggtggctaggttgttcgccatccgaagtcagaacaagtgtctcagtctcaacctagccacctagagtgaaggatacgagatgctagtg

SEQ ID NO: 885 - DNA, 150 bp, Artificial Sequence
  Synthetic polynucleotide
gtaatacgactcactataggctcactctgacttcggatggcgtatggcagttaccatacgatgccaagttagattttcgccatccgaagtcagaacaagtgtctcagtctaatctaacttggcatcagtgaaggatacgagatgctagtg

SEQ ID NO: 886 - DNA, 150 bp, Artificial Sequence
  Synthetic polynucleotide
gtaatacgactcactataggctcactctgacttcggatggcgtatggcagttaccatacgaatgaattgccagaattcgccatccgaagtcagaacaagtgtctcagtctttctggcaattcattcagtgaaggatacgagatgctagtg

SEQ ID NO: 887 - DNA, 150 bp, Artificial Sequence
  Synthetic polynucleotide
gtaatacgactcactataggctcactctgacttcggatggcgtatggcagttaccatactcacgcaaggacacacttcgccatccgaagtcagaacaagtgtctcagtctgtgtgtccttgcgtgaagtgaaggatacgagatgctagtg

SEQ ID NO: 888 - DNA, 150 bp, Artificial Sequence
  Synthetic polynucleotide
gtaatacgactcactataggctcactctgacttcggatggcgtatggcagttaccatacttatcgcatacggcatttcgccatccgaagtcagaacaagtgtctcagtctatgccgtatgcgataaagtgaaggatacgagatgctagtg

SEQ ID NO: 889 - DNA, 150 bp, Artificial Sequence
  Synthetic polynucleotide
gtaatacgactcactataggctcactctgacttcggatggcgtatggcagttaccatacctgacgcatatcggccttcgccatccgaagtcagaacaagtgtctcagtctggccgatatgcgtcagagtgaaggatacgagatgctagtg

SEQ ID NO: 890 - DNA, 150 bp, Artificial Sequence
  Synthetic polynucleotide
gtaatacgactcactataggctcactctgacttcggatggcgtatggcagttaccatacttgacgaggtgcaggcttcgccatccgaagtcagaacaagtgtctcagtctgcctgcacctcgtcaaagtgaaggatacgagatgctagtg

SEQ ID NO: 891 - DNA, 150 bp, Artificial Sequence
  Synthetic polynucleotide
gtaatacgactcactataggctcactctgacttcggatggcgtatggcagttaccatacagtaacaacctacagcttcgccatccgaagtcagaacaagtgtctcagtctgctgtaggttgttactagtgaaggatacgagatgctagtg

SEQ ID NO: 892 - DNA, 150 bp, Artificial Sequence
  Synthetic polynucleotide
gtaatacgactcactataggctcacttgatattgcaacttacacgcattcaatgctaagacagttgttgcaatatcatgaatacgacaccagtgtacctcactcaggtacactgctgtcttagcatagtgaaggatacgagatgctagtg

SEQ ID NO: 893 - DNA, 150 bp, Artificial Sequence
  Synthetic polynucleotide
gtaatacgactcactataggctcacttgatattgcaacttacacgcattcaatgctaagacagttgttgcaatatcatgaatacgacaccatcagctgacactctcagctgatgctgtcttagcatagtgaaggatacgagatgctagtg

SEQ ID NO: 894 - DNA, 150 bp, Artificial Sequence
  Synthetic polynucleotide
gtaatacgactcactataggctcacttgatattgcaacttacacgcattcaatgctaagacagttgttgcaatatcatgaatacgacacgaatccgtcgcactccgacggattcctgtcttagcatagtgaaggatacgagatgctagtg

SEQ ID NO: 895 - DNA, 150 bp, Artificial Sequence
  Synthetic polynucleotide
gtaatacgactcactataggctcacttgtagtactatgttacacgcattcaattccatcgtagttcatagtactacatgaatacgacaccagtgtacctcactcaggtacactgctacgatggaatagtgaaggatacgagatgctagtg

SEQ ID NO: 896 - DNA, 150 bp, Artificial Sequence
  Synthetic polynucleotide
gtaatacgactcactataggctcacttgtagtactatgttacacgcattcaattccatcgtagttcatagtactacatgaatacgacaccatcagctgacactctcagctgatgctacgatggaatagtgaaggatacgagatgctagtg

SEQ ID NO: 897 - DNA, 150 bp, Artificial Sequence
  Synthetic polynucleotide
gtaatacgactcactataggctcacttgtagtactatgttacacgcattcaattccatcgtagttcatagtactacatgaatacgacacgaatccgtcgcactccgacggattcctacgatggaatagtgaaggatacgagatgctagtg

SEQ ID NO: 898 - DNA, 150 bp, Artificial Sequence
  Synthetic polynucleotide
gtaatacgactcactataggctcactcgatgaacagttttacacgcattcacacctacctgacttaactgttcatcgtgaatacgacaccagtgtacctcactcaggtacactggtcaggtaggtgagtgaaggatacgagatgctagtg

SEQ ID NO: 899 - DNA, 150 bp, Artificial Sequence
  Synthetic polynucleotide
gtaatacgactcactataggctcactcgatgaacagttttacacgcattcacacctacctgacttaactgttcatcgtgaatacgacaccatcagctgacactctcagctgatggtcaggtaggtgagtgaaggatacgagatgctagtg

SEQ ID NO: 900 - DNA, 150 bp, Artificial Sequence
  Synthetic polynucleotide
gtaatacgactcactataggctcactcgatgaacagttttacacgcattcacacctacctgacttaactgttcatcgtgaatacgacacgaatccgtcgcactccgacggattcgtcaggtaggtgagtgaaggatacgagatgctagtg

SEQ ID NO: 901 - DNA, 150 bp, Artificial Sequence
  Synthetic polynucleotide
gtaatacgactcactataggctcactacttcaagatgcttacacgcattcatagagaataccattgcatcttgaagttgaatacgacaccagtgtacctcactcaggtacactgtggtattctctaagtgaaggatacgagatgctagtg

SEQ ID NO: 902 - DNA, 150 bp, Artificial Sequence
  Synthetic polynucleotide
gtaatacgactcactataggctcactacttcaagatgcttacacgcattcatagagaataccattgcatcttgaagttgaatacgacaccatcagctgacactctcagctgatgtggtattctctaagtgaaggatacgagatgctagtg

SEQ ID NO: 903 - DNA, 150 bp, Artificial Sequence
  Synthetic polynucleotide
gtaatacgactcactataggctcactacttcaagatgcttacacgcattcatagagaataccattgcatcttgaagttgaatacgacacgaatccgtcgcactccgacggattctggtattctctaagtgaaggatacgagatgctagtg

SEQ ID NO: 904 - DNA, 150 bp, Artificial Sequence
  Synthetic polynucleotide
gtaatacgactcactataggctcactagactgcaacaattacacgcattcattagacgttatgttttgttgcagtcttgaatacgacaccagtgtacctcactcaggtacactgcataacgtctaaagtgaaggatacgagatgctagtg

SEQ ID NO: 905 - DNA, 150 bp, Artificial Sequence
  Synthetic polynucleotide
gtaatacgactcactataggctcactagactgcaacaattacacgcattcattagacgttatgttttgttgcagtcttgaatacgacaccatcagctgacactctcagctgatgcataacgtctaaagtgaaggatacgagatgctagtg

SEQ ID NO: 906 - DNA, 150 bp, Artificial Sequence
  Synthetic polynucleotide
gtaatacgactcactataggctcactagactgcaacaattacacgcattcattagacgttatgttttgttgcagtcttgaatacgacacgaatccgtcgcactccgacggattccataacgtctaaagtgaaggatacgagatgctagtg

SEQ ID NO: 907 - DNA, 150 bp, Artificial Sequence
  Synthetic polynucleotide
gtaatacgactcactataggctcactaggtagctgactttacacgcattcataacggagcgagttagtcagctaccttgaatacgacaccagtgtacctcactcaggtacactgctcgctccgttaagtgaaggatacgagatgctagtg

SEQ ID NO: 908 - DNA, 150 bp, Artificial Sequence
  Synthetic polynucleotide
gtaatacgactcactataggctcactaggtagctgactttacacgcattcataacggagcgagttagtcagctaccttgaatacgacaccatcagctgacactctcagctgatgctcgctccgttaagtgaaggatacgagatgctagtg

SEQ ID NO: 909 - DNA, 150 bp, Artificial Sequence
  Synthetic polynucleotide
gtaatacgactcactataggctcactaggtagctgactttacacgcattcataacggagcgagttagtcagctaccttgaatacgacacgaatccgtcgcactccgacggattcctcgctccgttaagtgaaggatacgagatgctagtg

SEQ ID NO: 910 - DNA, 150 bp, Artificial Sequence
  Synthetic polynucleotide
gtaatacgactcactataggctcactgacgagttaacgttacacgcattcaatgaacatcagcttcgttaactcgtctgaatacgacaccagtgtacctcactcaggtacactggctgatgttcatagtgaaggatacgagatgctagtg

SEQ ID NO: 911 - DNA, 150 bp, Artificial Sequence
  Synthetic polynucleotide
gtaatacgactcactataggctcactgacgagttaacgttacacgcattcaatgaacatcagcttcgttaactcgtctgaatacgacaccatcagctgacactctcagctgatggctgatgttcatagtgaaggatacgagatgctagtg

SEQ ID NO: 912 - DNA, 150 bp, Artificial Sequence
  Synthetic polynucleotide
gtaatacgactcactataggctcactgacgagttaacgttacacgcattcaatgaacatcagcttcgttaactcgtctgaatacgacacgaatccgtcgcactccgacggattcgctgatgttcatagtgaaggatacgagatgctagtg

SEQ ID NO: 913 - DNA, 150 bp, Artificial Sequence
  Synthetic polynucleotide
gtaatacgactcactataggctcactcgcatgcatgtgttacacgcattcacgttatgctggattcacatgcatgcgtgaatacgacaccagtgtacctcactcaggtacactgtccagcataacgagtgaaggatacgagatgctagtg

SEQ ID NO: 914 - DNA, 150 bp, Artificial Sequence
  Synthetic polynucleotide
gtaatacgactcactataggctcactcgcatgcatgtgttacacgcattcacgttatgctggattcacatgcatgcgtgaatacgacaccatcagctgacactctcagctgatgtccagcataacgagtgaaggatacgagatgctagtg

SEQ ID NO: 915 - DNA, 150 bp, Artificial Sequence
  Synthetic polynucleotide
gtaatacgactcactataggctcactcgcatgcatgtgttacacgcattcacgttatgctggattcacatgcatgcgtgaatacgacacgaatccgtcgcactccgacggattctccagcataacgagtgaaggatacgagatgctagtg

SEQ ID NO: 916 - DNA, 150 bp, Artificial Sequence
  Synthetic polynucleotide
gtaatacgactcactataggctcactgttggcggatccttacacgcattcacggaacggtcgtttggatccgccaactgaatacgacaccagtgtacctcactcaggtacactgacgaccgttccgagtgaaggatacgagatgctagtg

SEQ ID NO: 917 - DNA, 150 bp, Artificial Sequence
  Synthetic polynucleotide
gtaatacgactcactataggctcactgttggcggatccttacacgcattcacggaacggtcgtttggatccgccaactgaatacgacaccatcagctgacactctcagctgatgacgaccgttccgagtgaaggatacgagatgctagtg

SEQ ID NO: 918 - DNA, 150 bp, Artificial Sequence
  Synthetic polynucleotide
gtaatacgactcactataggctcactgttggcggatccttacacgcattcacggaacggtcgtttggatccgccaactgaatacgacacgaatccgtcgcactccgacggattcacgaccgttccgagtgaaggatacgagatgctagtg

SEQ ID NO: 919 - DNA, 150 bp, Artificial Sequence
  Synthetic polynucleotide
gtaatacgactcactataggctcactctgcgaactggcttacacgcattcataggcgccaacgttgccagttcgcagtgaatacgacaccagtgtacctcactcaggtacactgcgttggcgcctaagtgaaggatacgagatgctagtg

SEQ ID NO: 920 - DNA, 150 bp, Artificial Sequence
  Synthetic polynucleotide
gtaatacgactcactataggctcactctgcgaactggcttacacgcattcataggcgccaacgttgccagttcgcagtgaatacgacaccatcagctgacactctcagctgatgcgttggcgcctaagtgaaggatacgagatgctagtg

SEQ ID NO: 921 - DNA, 150 bp, Artificial Sequence
  Synthetic polynucleotide
gtaatacgactcactataggctcactctgcgaactggcttacacgcattcataggcgccaacgttgccagttcgcagtgaatacgacacgaatccgtcgcactccgacggattccgttggcgcctaagtgaaggatacgagatgctagtg

SEQ ID NO: 922 - DNA, 150 bp, Artificial Sequence
  Synthetic polynucleotide
ctaatacgactcactataggcactgttgtggaagaagtccagcacgctgaccagcagccgcctagccaccggcgaggaggagggcggtggcagctccagcaagcgcttcctgcgctcttgctccgctcagttggatacagatcaggtcag

SEQ ID NO: 923 - DNA, 150 bp, Artificial Sequence
  Synthetic polynucleotide
ctaatacgactcactataggcactgtgtaaattgtagaccaatgcactaaaccaatgtggcctgtgtttgaggtccacaggaaaacaggctcacatgttaaatgtgagcctctaagtggcttaacatcagttggatacagatcaggtcag

SEQ ID NO: 924 - DNA, 150 bp, Artificial Sequence
  Synthetic polynucleotide
ctaatacgactcactataggcactgtggcggccgctgctgggggccgcggctggtgttgagtcggagagtccagtggagcctggggaggttgcccactccctgcgcccctcggctgccaccgcccctcagttggatacagatcaggtcag

SEQ ID NO: 925 - DNA, 150 bp, Artificial Sequence
  Synthetic polynucleotide
ctaatacgactcactataggcactgtagcaccacggggcgtggtctccacaagaccagccctctctctgcccaagccagggctgctggggggatgctggtggagggtggggacaccccacccagcatcagttggatacagatcaggtcag

SEQ ID NO: 926 - DNA, 150 bp, Artificial Sequence
  Synthetic polynucleotide
ctaatacgactcactataggcactgtaccgactggctgaatggaaaggattccaaggccagaggaaaggcccacccttttctctggccttggaatcctttccattcagggaaggaaaagggtggaatcagttggatacagatcaggtcag

SEQ ID NO: 927 - DNA, 150 bp, Artificial Sequence
  Synthetic polynucleotide
ctaatacgactcactataggcactgtgaccctgggcagctgaggaatgccatgggtgatgcccacaggcttggcctgtggtagagggctggggctgaagcctccagaactggaagagcaactgggctcagttggatacagatcaggtcag

SEQ ID NO: 928 - DNA, 150 bp, Artificial Sequence
  Synthetic polynucleotide
ctaatacgactcactataggcactgtatctcggcttgctgcagcctccgcctcccgggttcaagcggttctcctgcctcagcttcccaagtagctgggactacgggtgtgcaccaccacgcccggctcagttggatacagatcaggtcag

SEQ ID NO: 929 - DNA, 150 bp, Artificial Sequence
  Synthetic polynucleotide
ctaatacgactcactataggcactgttccagaacccgggccccaggcacccagaggccgcgagcgcagcacctcccggcgccagtttgctgctgctgcagcagcagcagcagcagcagcagcagcatcagttggatacagatcaggtcag

SEQ ID NO: 930 - DNA, 150 bp, Artificial Sequence
  Synthetic polynucleotide
ctaatacgactcactataggcactgttgacagatgtgagccaccgcacccggcctatcagtgcattaaaacacacaggccgggtgcggtggctcatgcctgccatcccagcactttgggaggccaatcagttggatacagatcaggtcag

SEQ ID NO: 931 - DNA, 150 bp, Artificial Sequence
  Synthetic polynucleotide
ctaatacgactcactataggcactgtcggggctccggcgggcgggcggcccggcgccggctcgcgccctgcccggtgcccggtcgggccggcggggtctgagcgccgcggcggggaatgcgggcgttcagttggatacagatcaggtcag

SEQ ID NO: 932 - DNA, 150 bp, Artificial Sequence
  Synthetic polynucleotide
ctaatacgactcactataggcactgtttcactatgttggccaggctgatcttgaactcttgacctcgtgatctgcccgcctcggcctcccaaagtgttggaaggccgaggcgggcagatcacgccttcagttggatacagatcaggtcag

SEQ ID NO: 933 - DNA, 150 bp, Artificial Sequence
  Synthetic polynucleotide
ctaatacgactcactataggcactgtatatatatatatatatatatatatatatacacacacacacacacacacactatatatatatacataccatatatatagtgtgtatgtgtgtatatatatatcagttggatacagatcaggtcag

SEQ ID NO: 934 - DNA, 150 bp, Artificial Sequence
  Synthetic polynucleotide
ctaatacgactcactataggcactgtggcgggggaagggagcgccgaggggctggagcgcggcattgcttaggggggtgggcggaccctgggcgggggctgcgcgccccggaggccgagcgggccgtcagttggatacagatcaggtcag

SEQ ID NO: 935 - DNA, 150 bp, Artificial Sequence
  Synthetic polynucleotide
ctaatacgactcactataggcactgtgcgcagcttggcacagctgcagctgcgcctccatgggacagggactcctctgcaaggagccgccccgcccagggtgtccccatgcaggacttcccagggctcagttggatacagatcaggtcag

SEQ ID NO: 936 - DNA, 150 bp, Artificial Sequence
  Synthetic polynucleotide
ctaatacgactcactataggcactgttgttggagtttgctggagatccactccagactctgtttgcctgggtatcagcagcggaggctgcagaacagcaaatattgctgaacagcaaatgttgctgtcagttggatacagatcaggtcag

SEQ ID NO: 937 - DNA, 150 bp, Artificial Sequence
  Synthetic polynucleotide
ctaatacgactcactataggcactgtagaattttcattttaggttcatgggtacatgtatgggtaaatttaccccaatttatgtgcacatgtacccctgaacctaaaatgaaaatgtaaaataaaatcagttggatacagatcaggtcag

SEQ ID NO: 938 - DNA, 150 bp, Artificial Sequence
  Synthetic polynucleotide
ctaatacgactcactataggcactgtaggcctgggctctgagtcttgagaaaggctcagagctccccctcttgaggggaagcatccaccttcacaaggcaagacacttcctgccaccagggagggttcagttggatacagatcaggtcag

SEQ ID NO: 939 - DNA, 150 bp, Artificial Sequence
  Synthetic polynucleotide
ctaatacgactcactataggcactgtactcggagccagcagagggccatctgctgggcccgacttcttttaagggaggccagagcagagggcccaatgggaggcagatgagccccaccttgggcagtcagttggatacagatcaggtcag

SEQ ID NO: 940 - DNA, 150 bp, Artificial Sequence
  Synthetic polynucleotide
ctaatacgactcactataggcactgtcagcagacctgggctgcctaaggctccactgaggcctgcccctcccccagcccacccaggagcaggccacaggcagcccaggcaggaaataagacaacaatcagttggatacagatcaggtcag

SEQ ID NO: 941 - DNA, 150 bp, Artificial Sequence
  Synthetic polynucleotide
ctaatacgactcactataggcactgtggcaggtcctcgggaggcagggccatgcctgacgggtagtgctgctgcaggccaggccccccgcccccacccccagtgggggccatggcaccatggggcttcagttggatacagatcaggtcag

SEQ ID NO: 942 - DNA, 150 bp, Artificial Sequence
  Synthetic polynucleotide
ctaatacgactcactataggcactgtggaaggtggactcggggtgacggccgaggcgaggggggcaacaggagagctgtgtcccccggcaggccactggtgaccgccttggcagagggaaccctggtcagttggatacagatcaggtcag

SEQ ID NO: 943 - DNA, 150 bp, Artificial Sequence
  Synthetic polynucleotide
ctaatacgactcactataggcactgttagcattaggagatacacctaatgttaaatgacgagttaacgggtgcagcacaccaacatggcacatgtatacatatgtaacaaacctgcacattatgcatcagttggatacagatcaggtcag

SEQ ID NO: 944 - DNA, 150 bp, Artificial Sequence
  Synthetic polynucleotide
ctaatacgactcactataggcactgtgattacaggcgtgagccaccgtgcctggcctctgtttaaccttttaaagtggttatcaggctgggcactggggctcacgcctgtaatcccagcactttggtcagttggatacagatcaggtcag

SEQ ID NO: 945 - DNA, 150 bp, Artificial Sequence
  Synthetic polynucleotide
ctaatacgactcactataggcactgttcagcctcctgagtagctgggattacaggcacctgccaccacgcctggccctccagtaaggaaaagaatagtactggactacatagtccagtactggacttcagttggatacagatcaggtcag

SEQ ID NO: 946 - DNA, 150 bp, Artificial Sequence
  Synthetic polynucleotide
ctaatacgactcactataggcactgtctataaaatgcaaataacacctcccatgagggctgggcgtggcgctcatgcctgtaatcccagcactttgggaggccgaggtgggtggatcacctgaggttcagttggatacagatcaggtcag

SEQ ID NO: 947 - DNA, 150 bp, Artificial Sequence
  Synthetic polynucleotide
ctaatacgactcactataggcactgtttgagcgtccttgaggcagctgctgcagaacagtgtacctcaaggacactccctaaggcaaggccagcaaaggtagtttttgcaactggccagtccaccctcagttggatacagatcaggtcag

SEQ ID NO: 948 - DNA, 150 bp, Artificial Sequence
  Synthetic polynucleotide
ctaatacgactcactataggcactgtgagcaggtgagctgctctggctcctgtggagagcgggaggccgccctgccctggtgctcggcccactccggaagccagggccaccggcagctgcacttggtcagttggatacagatcaggtcag

SEQ ID NO: 949 - DNA, 150 bp, Artificial Sequence
  Synthetic polynucleotide
ctaatacgactcactataggcactgtccgggactagagccgcgggcgatttctcttctgcgtccctggggagcgcggagggcgtagcggcctcccgcggcgggagttagggttagcccgaggatcttcagttggatacagatcaggtcag

SEQ ID NO: 950 - DNA, 150 bp, Artificial Sequence
  Synthetic polynucleotide
ctaatacgactcactataggcactgtgggaccctgcccggctctgcccgggtaggggttctgggctggggatggggccccaagcctcagctctgcggcggctccagctgctcacagctccctgccctcagttggatacagatcaggtcag

SEQ ID NO: 951 - DNA, 150 bp, Artificial Sequence
  Synthetic polynucleotide
ctaatacgactcactataggcactgtggggggctgttccccccacctccctcccggatggggcggctggccgggcagaggggtcctcacttcccagtaggggcggcccggcagaggcgcccctcactcagttggatacagatcaggtcag

SEQ ID NO: 952 - DNA, 150 bp, Artificial Sequence
  Synthetic polynucleotide
ctaatacgactcactataggcactgtttataggcgaaagccactgtgcccagcccacttttaattttttaaaaagatacttggctgggcgcagtggctcacacctgtaatcccagcactttgggagtcagttggatacagatcaggtcag

SEQ ID NO: 953 - DNA, 150 bp, Artificial Sequence
  Synthetic polynucleotide
ctaatacgactcactataggcactgtctggagggtgggaaggcagaaaggagctttactgagcagcagaacagcactcaggaaacccagagtgggtagctcctttctgcaggcagatcatcccaagtcagttggatacagatcaggtcag

SEQ ID NO: 954 - DNA, 150 bp, Artificial Sequence
  Synthetic polynucleotide
ctaatacgactcactataggcactgtaggagtgctggaactgcaggggccagggctggggaaatgtgtcaccatccccagtccctgacccacccaccctgtctctccacaggccctgggtgccaggtcagttggatacagatcaggtcag

SEQ ID NO: 955 - DNA, 150 bp, Artificial Sequence
  Synthetic polynucleotide
ctaatacgactcactataggcactgtcttcctgagtgccagccccagcagcaggcccctgccctggctggcacagactccctgggcttagtccttgcttctcagggtgtgggacaggcaggaggcttcagttggatacagatcaggtcag

SEQ ID NO: 956 - DNA, 150 bp, Artificial Sequence
  Synthetic polynucleotide
ctaatacgactcactataggcactgtgtatttgctcatagatgatatgcatagtactcccagaactcattaagttggtagtactgtgcatatcatctatgagcgaataggctcagacagagtgagttcagttggatacagatcaggtcag

SEQ ID NO: 957 - DNA, 150 bp, Artificial Sequence
  Synthetic polynucleotide
ctaatacgactcactataggcactgtgcggccgtaggtttcggggtgggggagggtgacgtcgctgcccgcccgtcccggggctgcgggctggggtcctcccccaatcccgacgccgggagcgaggtcagttggatacagatcaggtcag

SEQ ID NO: 958 - DNA, 150 bp, Artificial Sequence
  Synthetic polynucleotide
ctaatacgactcactataggcactgtcactgcccgcctggctgctccaggcgcgccgaccgctcaagcgctccaggtccacccggcggagggcagagaaagcgcgaccgcgcggcccgcagggttgtcagttggatacagatcaggtcag

SEQ ID NO: 959 - DNA, 150 bp, Artificial Sequence
  Synthetic polynucleotide
ctaatacgactcactataggcactgtaagggggacaccgcctgtgatttggccaggctctatgggaggaatgaggttgttagcctgatgcaggcaaacggggctgggggagccacaaatcttcaattcagttggatacagatcaggtcag

SEQ ID NO: 960 - DNA, 150 bp, Artificial Sequence
  Synthetic polynucleotide
ctaatacgactcactataggcactgtcgcggcgcccagccccttgagcgcgctgccagggcccggcaggccggcggcaccgagcgcgggcgcggggtgcgggctgggcacgggcgtgggcggcggctcagttggatacagatcaggtcag

SEQ ID NO: 961 - DNA, 150 bp, Artificial Sequence
  Synthetic polynucleotide
ctaatacgactcactataggcactgtgttcattgcccagggggcccctggtggtgggaccactgcgggctcaggagcaggtgctgggagtggccccaatgggccagtacccctgggcatcctgcaatcagttggatacagatcaggtcag

SEQ ID NO: 962 - DNA, 150 bp, Artificial Sequence
  Synthetic polynucleotide
ctaatacgactcactataggcactgtagtgctgccctgagggcaggtgggcagggcaagtggacaggtgactggtgctgtggtcaagggggtagcacacaggtcacccttggcctggccaggcagttcagttggatacagatcaggtcag

SEQ ID NO: 963 - DNA, 150 bp, Artificial Sequence
  Synthetic polynucleotide
ctaatacgactcactataggcactgtggaagggcggcccgggaagcgccggcgcaggggcggggccaggctgcgctgggtgtaagagccgctgagtgactctgtggctgcggctctggacacggcttcagttggatacagatcaggtcag

SEQ ID NO: 964 - DNA, 150 bp, Artificial Sequence
  Synthetic polynucleotide
ctaatacgactcactataggcactgtcctccagtggtgagctcagggcaggcgcagccacccagcctgcagaataggcaggtggctgagcctgatggccctgatgccttgggatggaacaaaattgtcagttggatacagatcaggtcag

SEQ ID NO: 965 - DNA, 150 bp, Artificial Sequence
  Synthetic polynucleotide
ctaatacgactcactataggcactgtcagcagctggggacgtgagtgaccacccctgagccaggcagatgccagggtctggcacacagtgggtgccagagcctggttgtcaaaagcctgaggatgctcagttggatacagatcaggtcag

SEQ ID NO: 966 - DNA, 150 bp, Artificial Sequence
  Synthetic polynucleotide
ctaatacgactcactataggcactgttggcggctgggaggggtgtacggtcagcataggcctggatggtaaagctgcctccgtggcagctgagcacccccttccaggccttctggggctgtgggggtcagttggatacagatcaggtcag

SEQ ID NO: 967 - DNA, 150 bp, Artificial Sequence
  Synthetic polynucleotide
ctaatacgactcactataggcactgtggccaggatgccttgggtatggaccccatgatggaacatgagatgggtggccaccaccctggtgctgactatccagttgatgggctgccagatctggggctcagttggatacagatcaggtcag

SEQ ID NO: 968 - DNA, 150 bp, Artificial Sequence
  Synthetic polynucleotide
ctaatacgactcactataggcactgtagatggatttagacagactggcaaaaatatttgcaatatatatgagagagagagtgtgtgtgtgtgtgtgcgcgcgcgcgcgcgcacgccacgcacacactcagttggatacagatcaggtcag

SEQ ID NO: 969 - DNA, 150 bp, Artificial Sequence
  Synthetic polynucleotide
ctaatacgactcactataggcactgtttcagccaacagcttccttggcctctgactgttggtggcgtggacgatggccaggtagcggtccagactgatgaaggccaggatgaggacactgctgtagtcagttggatacagatcaggtcag

SEQ ID NO: 970 - DNA, 150 bp, Artificial Sequence
  Synthetic polynucleotide
ctaatacgactcactataggcactgtatatatacacacatatacacatgtgtatatatacacacgtgtacatatgtgtgtatatacacacgtgtacatatgtgtgtgtatatacacacgtgtacattcagttggatacagatcaggtcag

SEQ ID NO: 971 - DNA, 150 bp, Artificial Sequence
  Synthetic polynucleotide
ctaatacgactcactataggcactgtcagcttgtagcatttcttgccgcccgaactactgcttcctctggccccatgaggctcagaggagctaggggcttctgccccaggtgaggccgcattggggtcagttggatacagatcaggtcag

SEQ ID NO: 972 - DNA, 150 bp, Artificial Sequence
  Synthetic polynucleotide
ctaatacgactcactataggcactgtcccctcagtcagtcttgtctgggcccagagaggcccaggtgtcaggtctctgcacctcaggcctcatgtgggccatgtgtgtgttttcctggaagctgcatcagttggatacagatcaggtcag

SEQ ID NO: 973 - DNA, 150 bp, Artificial Sequence
  Synthetic polynucleotide
ctaatacgactcactataggcactgtctgtttcgtgtctgccagaccctgggcgcgcctgccttcagggtcccaggcacacagctgctgggcagcgggcaggccgtagagctacagcctgcagtcctcagttggatacagatcaggtcag

SEQ ID NO: 974 - DNA, 150 bp, Artificial Sequence
  Synthetic polynucleotide
ctaatacgactcactataggcactgtactttacagccagcgatgcaaagatggtgttgttgaccagggcagaccgcaggtctgtcaggacccccggggagtgctgccgcgggtcttcataaaggtgtcagttggatacagatcaggtcag

SEQ ID NO: 975 - DNA, 150 bp, Artificial Sequence
  Synthetic polynucleotide
ctaatacgactcactataggcactgttagggcgcggagggcggaccgggaatggcgcgccgtgcgccgccggcgtaactgcggcgcttgcgtgcccgcggcggggaaccggacggggtcggggaggtcagttggatacagatcaggtcag

SEQ ID NO: 976 - DNA, 150 bp, Artificial Sequence
  Synthetic polynucleotide
ctaatacgactcactataggcactgtgggtgcgggcctggcgccgggctcagcccgcgggggccgcgtgggcggggacggggcgtcttgtcgcgggcacctgtgcgcgtgggcgggcgcgcactcgtcagttggatacagatcaggtcag

SEQ ID NO: 977 - DNA, 150 bp, Artificial Sequence
  Synthetic polynucleotide
ctaatacgactcactataggcactgtcaggtgtctgaggcgtgagaatcgcttgaacccaggaggcggaggttgcagtgagctgagatcatgccactgcaccgcagcctgggcagcagaatgagattcagttggatacagatcaggtcag

SEQ ID NO: 978 - DNA, 150 bp, Artificial Sequence
  Synthetic polynucleotide
ctaatacgactcactataggcactgtatggccgcctcgcggagacgtccgggtctgctccacctgcagcccttcggtcgcgcctgggcttcgcggtggagcgggacgcggctgtccggccactgcatcagttggatacagatcaggtcag

SEQ ID NO: 979 - DNA, 150 bp, Artificial Sequence
  Synthetic polynucleotide
ctaatacgactcactataggcactgtcctgctgtctggcctggtttctaacaggccacaaaggtaccagtctgtggcccaggggttggggacccctggtatagtctgttgctcctaggttacatagtcagttggatacagatcaggtcag

SEQ ID NO: 980 - DNA, 150 bp, Artificial Sequence
  Synthetic polynucleotide
ctaatacgactcactataggcactgtatgtcacgtatacaagacatcttatatatcctatcatgtaagatgtcttgtatacgtaagtaatagaaatgaaaatcagcagatagttaaggcataatgatcagttggatacagatcaggtcag

SEQ ID NO: 981 - DNA, 150 bp, Artificial Sequence
  Synthetic polynucleotide
ctaatacgactcactataggcactgttccacccgtgcggccccagtggcctggagcttccagccccgcgcttggccgcggcttggcgaggctatgctgcgggaagctggaatccaacgcgcggccgtcagttggatacagatcaggtcag

SEQ ID NO: 982 - DNA, 150 bp, Artificial Sequence
  Synthetic polynucleotide
ctaatacgactcactataggcactgtgcagcggcgggaccctgccctgtggatgccccgccgaggtcccgcggccggcggggccagaggggcccggacgagctctcctatcccgaagttgtggacatcagttggatacagatcaggtcag

SEQ ID NO: 983 - DNA, 150 bp, Artificial Sequence
  Synthetic polynucleotide
ctaatacgactcactataggcactgtccggcgggctcggcacctgggagccggaacccagtgcgcgcagcctcggagggtatgggcacggtctcaggcggcgcggggttgtgggtgctgcccccggtcagttggatacagatcaggtcag

SEQ ID NO: 984 - DNA, 150 bp, Artificial Sequence
  Synthetic polynucleotide
ctaatacgactcactataggcactgtggataatggcctccaccaaaggagctggaggccattatccttagcaaactaacacaggaacagaaaagcaaatactgcatgttcccacttataagtgggatcagttggatacagatcaggtcag

SEQ ID NO: 985 - DNA, 150 bp, Artificial Sequence
  Synthetic polynucleotide
ctaatacgactcactataggcactgtacatatgtgtatatacatgtatgcacatgtacatatatacatatgtgtatatgtacatgtatacacatgtacatatatacatatgtgtatatgtacatgttcagttggatacagatcaggtcag

SEQ ID NO: 986 - DNA, 150 bp, Artificial Sequence
  Synthetic polynucleotide
ctaatacgactcactataggcactgtacgagcccagcggctacacggtgcgcgaggccggcccgccggcattctacaggtacccgcgcccgcgccgcccgtcggggtggccgccgcgcccggcaggtcagttggatacagatcaggtcag

SEQ ID NO: 987 - DNA, 150 bp, Artificial Sequence
  Synthetic polynucleotide
ctaatacgactcactataggcactgtgaggtgggaggattgcttcagcctgggaggttgaggctgcagtgagctgtgattgtgtcactgcactgcagcctgggtgaacagagtgggaccctctctctcagttggatacagatcaggtcag

SEQ ID NO: 988 - DNA, 150 bp, Artificial Sequence
  Synthetic polynucleotide
ctaatacgactcactataggcactgttaaatggactggcacacacagaatgccgggcccagtgcccggctgtgacactcagtgtcgtggttattactagactggtgctcaccaccagtgtcattactcagttggatacagatcaggtcag

SEQ ID NO: 989 - DNA, 150 bp, Artificial Sequence
  Synthetic polynucleotide
ctaatacgactcactataggcactgtaaaaaggtacagtaaaaaggctgcattgaagatttttggggggatgggggacagcctgggcaacagggtcttgctctgttgcccaggctggagtgcagtgtcagttggatacagatcaggtcag

SEQ ID NO: 990 - DNA, 150 bp, Artificial Sequence
  Synthetic polynucleotide
ctaatacgactcactataggcactgtggaaacaaaaacaaaaaatggtttcttgtggaaaccattctgtttccagcagcagcactggaaacagaagctcaagaagagaagagacctctatttaaattcagttggatacagatcaggtcag

SEQ ID NO: 991 - DNA, 150 bp, Artificial Sequence
  Synthetic polynucleotide
ctaatacgactcactataggcactgtaatagggttcgtgctcctattagaatctaatgccacagctgatctgacaggaggcggagcacaggcggtaatgctcactcacctaccgcccgcctcctgctcagttggatacagatcaggtcag

SEQ ID NO: 992 - DNA, 150 bp, Artificial Sequence
  Synthetic polynucleotide
ctaatacgactcactataggcactgtcgatgggccgggcccctcctccctgctcagggaggtgcgtgcacgcagtggggacggcctgagctctggctctggcacgggcagccttacctggttggagtcagttggatacagatcaggtcag

SEQ ID NO: 993 - DNA, 150 bp, Artificial Sequence
  Synthetic polynucleotide
ctaatacgactcactataggcactgtgcactgcagtggtacaaccacagctcactgcagccttgacctcctgggctcaggtgatcctcccacctgagcctcccaagtaactgggactgcaggcatgtcagttggatacagatcaggtcag

SEQ ID NO: 994 - DNA, 150 bp, Artificial Sequence
  Synthetic polynucleotide
ctaatacgactcactataggcactgtgggcgcgcacagctcagcccggcggccgcgcggagggaggccttggcccggtgagctcgcgccccacccgggccgaggcccgaacagccgcttctttgtatcagttggatacagatcaggtcag

SEQ ID NO: 995 - DNA, 150 bp, Artificial Sequence
  Synthetic polynucleotide
ctaatacgactcactataggcactgtgaatacaggcatgagccaccatgcccagcctaaggcagaattcagactgtagtatagggctgggcgcagtggctcacacctgtaatcccaacactttgggtcagttggatacagatcaggtcag

SEQ ID NO: 996 - DNA, 150 bp, Artificial Sequence
  Synthetic polynucleotide
ctaatacgactcactataggcactgtgtagggcggcttggcgtgcgggtagctgcgcttgaacgtcttggcgtcgccgccgccgcccgcgcggctgcggcccaggttggacggcgcgtacgccatgtcagttggatacagatcaggtcag

SEQ ID NO: 997 - DNA, 150 bp, Artificial Sequence
  Synthetic polynucleotide
ctaatacgactcactataggcactgttgcaggcccggcgcactggtgggcgcgggcgccgggggcgcggcggtggctgggctggcagggctgagctggcccggcggcggcgcggcggccccgtggttcagttggatacagatcaggtcag

SEQ ID NO: 998 - DNA, 150 bp, Artificial Sequence
  Synthetic polynucleotide
ctaatacgactcactataggcactgtaggagccgggcctggtggtccaggattataaggtgcagggttgtatggtcccattggagttccaggccctggaggcccaggaggtccatgggggcctgggtcagttggatacagatcaggtcag

SEQ ID NO: 999 - DNA, 150 bp, Artificial Sequence
  Synthetic polynucleotide
ctaatacgactcactataggcactgtatggagttccctggcctggggtccctggggacctcagagcccctcccccagtttgtggatcctgctctggtgtcctccacaccagaatcaggggttttcttcagttggatacagatcaggtcag

SEQ ID NO: 1000 - DNA, 150 bp, Artificial Sequence
  Synthetic polynucleotide
ctaatacgactcactataggcactgtggagacgcgcgcccgcgcgtgagcggggttggcatagtaggggttgccctgcgagtcgaggtgattgaagaagacgtccacctcgtctggaggcagcagctcagttggatacagatcaggtcag

SEQ ID NO: 1001 - DNA, 150 bp, Artificial Sequence
  Synthetic polynucleotide
ctaatacgactcactataggcactgtgggcctgcagtcctagctgggacagggccagtgctgccccagaaggggctgacccagcagccaccagcgacacaaaaaggcaggcctgcggcctggcttgtcagttggatacagatcaggtcag

SEQ ID NO: 1002 - DNA, 150 bp, Artificial Sequence
  Synthetic polynucleotide
ctaatacgactcactataggcactgtggggaggggagcgcctgggcagctgtgggcttggtggtgagcatggtggccgcgctgccagggtggggccatgccgggggtcccggccggcccaggctactcagttggatacagatcaggtcag

SEQ ID NO: 1003 - DNA, 150 bp, Artificial Sequence
  Synthetic polynucleotide
ctaatacgactcactataggcactgtcaaaatgggaagagggaacagaatgaatgtcattgagatgcttgtaggacagcggtccctgtcctacaagcatctcaatgacattcattctgttccctcttcagttggatacagatcaggtcag

SEQ ID NO: 1004 - DNA, 150 bp, Artificial Sequence
  Synthetic polynucleotide
ctaatacgactcactataggcactgtcgcgcgcgccgagcccgccccccgccccgggcgcgcgctcccgagccccccgcccgttcgcgggctctgtctgtggggggcgaggccggaagggggaccctcagttggatacagatcaggtcag

SEQ ID NO: 1005 - DNA, 150 bp, Artificial Sequence
  Synthetic polynucleotide
ctaatacgactcactataggcactgttgagcatcccctacagagtcgggcctgctccctgggccaggctgcctgggggcgccccccagcccagccagccaggctctcaggccctgcgcctgcctcatcagttggatacagatcaggtcag

SEQ ID NO: 1006 - DNA, 150 bp, Artificial Sequence
  Synthetic polynucleotide
ctaatacgactcactataggcactgtgcccgagctactcgggaggctgaggcaggagaatgacatgaacctgggaggtggagcttgcagtgagctgagatcttgccactgcactccagcctgggcatcagttggatacagatcaggtcag

SEQ ID NO: 1007 - DNA, 150 bp, Artificial Sequence
  Synthetic polynucleotide
ctaatacgactcactataggcactgttcccagctacttgggaggctgaggcatgagaattgcttgaacccggaaggcagaggttgcagtgagccaagatggcaccactgcactccagcctgggcgatcagttggatacagatcaggtcag

SEQ ID NO: 1008 - DNA, 150 bp, Artificial Sequence
  Synthetic polynucleotide
ctaatacgactcactataggcactgtttacgctctttctccgcgaatgcggcgagcgagctggatgtctttgggcataatagtcactcgcttagcatggatggcgcaaaggtttgtgtcctcaaagtcagttggatacagatcaggtcag

SEQ ID NO: 1009 - DNA, 150 bp, Artificial Sequence
  Synthetic polynucleotide
ctaatacgactcactataggcactgtggtgggggagggctggtggattcctgctttcccagaggcctcagggagcctcccgagggcctggacagggggcaggggagcagtcagggccccctgactttcagttggatacagatcaggtcag

SEQ ID NO: 1010 - DNA, 150 bp, Artificial Sequence
  Synthetic polynucleotide
ctaatacgactcactataggcactgtggctacgggggctgcaggcgcagcggcatccaggacatgcgcagagaggacaggaggcccctgcctggacgcagccggcctggccccacctgtgcggcgttcagttggatacagatcaggtcag

SEQ ID NO: 1011 - DNA, 150 bp, Artificial Sequence
  Synthetic polynucleotide
ctaatacgactcactataggcactgtctgtaatcccagcactttgggaggcggaggcggaggcgggcggatcacaaggtcaggagtttgagaccagcctgaccaacatggtgaaaccccgtctctatcagttggatacagatcaggtcag

SEQ ID NO: 1012 - DNA, 150 bp, Artificial Sequence
  Synthetic polynucleotide
ctaatacgactcactataggcactgtccgtccccgggctgcgggctggcgggacgtgcttcccggccccagcctgggaagccgccacgtcgcagctgggggcgcgcgcctgcctggaccctccgcgtcagttggatacagatcaggtcag

SEQ ID NO: 1013 - DNA, 150 bp, Artificial Sequence
  Synthetic polynucleotide
ctaatacgactcactataggcactgtgcttggcgtgctggagtggctctccctggagataggcatgtcctgggagtggcactcacagcaggatatgaacacagcccttggcatcacccacaatgagtcagttggatacagatcaggtcag

SEQ ID NO: 1014 - DNA, 150 bp, Artificial Sequence
  Synthetic polynucleotide
ctaatacgactcactataggcactgtgctgggtccccggagaagactcagttggcaaacgccatgtggttgccacagctggaagcactgggggaggaggagccctgcctggccccggcgggggcagtcagttggatacagatcaggtcag

SEQ ID NO: 1015 - DNA, 150 bp, Artificial Sequence
  Synthetic polynucleotide
ctaatacgactcactataggcactgtggaggattgcttgagcccaggaatttgaggttgcagtgagctatgactgcaccactgcactccagcctgggagacagagcaagactctgtctcaaaaacatcagttggatacagatcaggtcag

SEQ ID NO: 1016 - DNA, 150 bp, Artificial Sequence
  Synthetic polynucleotide
ctaatacgactcactataggcactgtcctggggctggagggcacagccagtggtcacttcaagtcttgaagtgtctcagaagctccagaagcaaagagtccattgaggaacatgctggcaattctgtcagttggatacagatcaggtcag

SEQ ID NO: 1017 - DNA, 150 bp, Artificial Sequence
  Synthetic polynucleotide
ctaatacgactcactataggcactgtagcattctgggaaggcaatgaacctgacaggctctgagccacggagccccgaggcccagctgttcagcaagagcctgggcaggtggtggtgttcctgcattcagttggatacagatcaggtcag

SEQ ID NO: 1018 - DNA, 150 bp, Artificial Sequence
  Synthetic polynucleotide
ctaatacgactcactataggcactgttctggagttccctgggccaggtgggctttggccccatgctgggcgggggctcatgcccctcgtccctcccgcccagcagcggccctgtgggcagtggcggtcagttggatacagatcaggtcag

SEQ ID NO: 1019 - DNA, 150 bp, Artificial Sequence
  Synthetic polynucleotide
ctaatacgactcactataggcactgtgtcgcgcaagcagccgctgggcaggtactccatgaccagccgcaggctctggcggcctggagaaggcaggatctgtcacagcagggcccagccctgctcgtcagttggatacagatcaggtcag

SEQ ID NO: 1020 - DNA, 150 bp, Artificial Sequence
  Synthetic polynucleotide
ctaatacgactcactataggcactgttccagggactggtgccagaggtggctgctcggccatctgctgggggctggagtctggcaggcagcatatggtggcaggtgggcagccccggggccgaggatcagttggatacagatcaggtcag

SEQ ID NO: 1021 - DNA, 150 bp, Artificial Sequence
  Synthetic polynucleotide
ctaatacgactcactataggcactgtatgaaatcctgcggagtgtcgctcgctaccgccgccgctgccgccgccgctttcggtgatgaggaaaagaaaatggcggcgggaaaagcgagcggcgagatcagttggatacagatcaggtcag

SEQ ID NO: 1022 - DNA, 150 bp, Artificial Sequence
  Synthetic polynucleotide
ctaatacgactcactataggcactgtgggccgggtcccgcaaagaggcagaaccgagtgtaccgtccgatccgggagacccggcctgagattccggcaaggttttcttccccgggcccggactaggtcagttggatacagatcaggtcag

SEQ ID NO: 1023 - DNA, 150 bp, Artificial Sequence
  Synthetic polynucleotide
ctaatacgactcactataggcactgtgcgagttgttcctgccgcccacggcgtacaacagcccgcccaccacgcagccggccaggccgctccgcggcacctgcaggtccgccaaccggagccaggttcagttggatacagatcaggtcag

SEQ ID NO: 1024 - DNA, 150 bp, Artificial Sequence
  Synthetic polynucleotide
ctaatacgactcactataggcactgtactactcggcgaagcctgtgcctgggagggtggtacccgccagggtgcatccggagagaggactgcgggccctcagtgcccgtgcgttccagcctccgggtcagttggatacagatcaggtcag

SEQ ID NO: 1025 - DNA, 150 bp, Artificial Sequence
  Synthetic polynucleotide
ctaatacgactcactataggcactgtcggagggggagcggactccctgccatagaggaggcctccgcccgtgccgcccggcgccacgcccgggtcgttcccggcccggatcggataggtgaagctgtcagttggatacagatcaggtcag

SEQ ID NO: 1026 - DNA, 150 bp, Artificial Sequence
  Synthetic polynucleotide
ctaatacgactcactataggcactgtctagactagaatgcaattctagaattgaactgaattctagaatgcagaaatcaactgcattctagtcggaattactaggaggaccatgtgctgccccagctcagttggatacagatcaggtcag

SEQ ID NO: 1027 - DNA, 150 bp, Artificial Sequence
  Synthetic polynucleotide
ctaatacgactcactataggcactgtcatcgctagggaaggaccctggccccaggatggggccactcagcttgcttgggggcaaccccacaaggctgctcttgtcctagaagagacaaggtagatgtcagttggatacagatcaggtcag

SEQ ID NO: 1028 - DNA, 150 bp, Artificial Sequence
  Synthetic polynucleotide
ctaatacgactcactataggcactgtgccaggctggtcttgaactcctgacctcaggtgatcacccgcctaggcctcccaaagtgctgggattacaggcgtgagccaccgcgcccggccaaaaatgtcagttggatacagatcaggtcag

SEQ ID NO: 1029 - DNA, 150 bp, Artificial Sequence
  Synthetic polynucleotide
ctaatacgactcactataggcactgtagggattacaggcacttgccaccacacccggctgatgtttgtaattttagtagaggtggggtttcaccatgttggtcaggctggtctcaaactcctgacctcagttggatacagatcaggtcag

SEQ ID NO: 1030 - DNA, 150 bp, Artificial Sequence
  Synthetic polynucleotide
ctaatacgactcactataggcactgtgctggcactgccacactgccctgatgtcatgcatgagagtacttgttctgtctgggccgggcagggggcctggcacagcagggatttgaggcagtggctgtcagttggatacagatcaggtcag

SEQ ID NO: 1031 - DNA, 150 bp, Artificial Sequence
  Synthetic polynucleotide
ctaatacgactcactataggcactgtgaacctcggggcccggctggggaggcccgagccggggagcaggagcgcgcgccaggctccgatctggtttgtcacgtacgtctggggctggcagggggcgtcagttggatacagatcaggtcag

SEQ ID NO: 1032 - DNA, 150 bp, Artificial Sequence
  Synthetic polynucleotide
ctaatacgactcactataggcactgttggtgcgccaggggcagaggggaggcagctgctgaccctggcacagcaggccccgcgcagggcactgcgcgtccagaccggaagttgcagattcaggccgtcagttggatacagatcaggtcag

SEQ ID NO: 1033 - DNA, 150 bp, Artificial Sequence
  Synthetic polynucleotide
ctaatacgactcactataggcactgtatggcggctccgagcccgagcggcggcggcggctccgggggcggcagcggcagcggcacccccggccccgtagggtccccggcgccaggccacccggccgtcagttggatacagatcaggtcag

SEQ ID NO: 1034 - DNA, 150 bp, Artificial Sequence
  Synthetic polynucleotide
ctaatacgactcactataggcactgttgatatatatatgagatatatatatcatatatgagatatatatgatatatatgatatatatatcatatatatgagatatatatgacatatatatgagatatcagttggatacagatcaggtcag

SEQ ID NO: 1035 - DNA, 150 bp, Artificial Sequence
  Synthetic polynucleotide
ctaatacgactcactataggcactgtcatctggggagccagccaagtttgagaagttggctcaacaaggaaaggcagcagtccactgcctggtagaaagcctgggctggggactgttgttctcaaatcagttggatacagatcaggtcag

SEQ ID NO: 1036 - DNA, 150 bp, Artificial Sequence
  Synthetic polynucleotide
ctaatacgactcactataggcactgttagcagagtcagggcatgttgggacagtcatctgtccatcagatgactcccagctcttcctacggtttgcagacttcccaggtaagagcctgggattgtgtcagttggatacagatcaggtcag

SEQ ID NO: 1037 - DNA, 150 bp, Artificial Sequence
  Synthetic polynucleotide
ctaatacgactcactataggcactgtcactgcaccctggccggtgcccaggcccttgtccagtgctggcttcttgggcggcgggggctcctctggcttggactcccgccgtgggccccgccgccggtcagttggatacagatcaggtcag

SEQ ID NO: 1038 - DNA, 150 bp, Artificial Sequence
  Synthetic polynucleotide
ctaatacgactcactataggcactgtagctactcaggaggctgagggacggaggtgacctgagtcctgaaggcggaggttgcagtgagccaagatggcaccactgcactccagcctgggagacagatcagttggatacagatcaggtcag

SEQ ID NO: 1039 - DNA, 150 bp, Artificial Sequence
  Synthetic polynucleotide
ctaatacgactcactataggcactgtccgggcagaggcatgtacagcgcatgcccacaacggcggaggccgccgggttccctgacgtgccagtcaggccttctccttttccgcagaccgtgtgttttcagttggatacagatcaggtcag

SEQ ID NO: 1040 - DNA, 150 bp, Artificial Sequence
  Synthetic polynucleotide
ctaatacgactcactataggcactgtgggactgggcgccgggtgcgagtggggcggggctcggagaggggcgaggcgcggggcgcggagaggggcggggccctgaccttgcgggccgacggctgcgtcagttggatacagatcaggtcag

SEQ ID NO: 1041 - DNA, 150 bp, Artificial Sequence
  Synthetic polynucleotide
ctaatacgactcactataggcactgtcatccttcccggacggggcggctggccgggcagagggtctcctcacttcccagtaggggcggccgggcagaggcgcccctcacctcccggacggggcagctcagttggatacagatcaggtcag

SEQ ID NO: 1042 - DNA, 150 bp, Artificial Sequence
  Synthetic polynucleotide
ctaatacgactcactataggcactgtccgccgctgcccccggggcctctccttccccaggcggggatgcggcctggagcgaggctgggcctgggcccaggcccttggcgcgctccgcgtcaccgcctcagttggatacagatcaggtcag

SEQ ID NO: 1043 - DNA, 150 bp, Artificial Sequence
  Synthetic polynucleotide
ctaatacgactcactataggcactgtccgggcagaggggctcctcacttcccagtaggggcggccgggcagaggcgcccctcacctcccggacagggcggctggccgggcggggggctgacccccctcagttggatacagatcaggtcag

SEQ ID NO: 1044 - DNA, 150 bp, Artificial Sequence
  Synthetic polynucleotide
ctaatacgactcactataggcactgtccatgcgggtcccgttccttcttaataaccggtcgcggttattaagaaggactggagaaaggtccggataggcggagatgggaaggaagcagcttaggcatcagttggatacagatcaggtcag

SEQ ID NO: 1045 - DNA, 150 bp, Artificial Sequence
  Synthetic polynucleotide
ctaatacgactcactataggcactgtggcggtgcacccggccccgggcgcacgtgaggacgagcatgtgcgcgcgcccagcgggcaccaccaggcgggccgctgcctactgtgggcctgcaaggcgtcagttggatacagatcaggtcag

SEQ ID NO: 1046 - DNA, 150 bp, Artificial Sequence
  Synthetic polynucleotide
ctaatacgactcactataggcactgtggcccatgcaatatttgagggccttaccctacggagtggctttctcggggcacctgctctgctggagccctggcctaggtggctagcatgcagccgcatgtcagttggatacagatcaggtcag

SEQ ID NO: 1047 - DNA, 150 bp, Artificial Sequence
  Synthetic polynucleotide
ctaatacgactcactataggcactgtgccgcccagtccgggaggtggggggcagcccctgcccagtcagccgccccatccggggggtggggcgcctccacctggccgctgccccgtctgggaggtgtcagttggatacagatcaggtcag

SEQ ID NO: 1048 - DNA, 150 bp, Artificial Sequence
  Synthetic polynucleotide
ctaatacgactcactataggcactgtgtctagtgcatgtctcagagccagagaaaagctagttatttgcacagtctccttcaaggcataattatatatatatatatatatataattatgccttgaatcagttggatacagatcaggtcag

SEQ ID NO: 1049 - DNA, 150 bp, Artificial Sequence
  Synthetic polynucleotide
ctaatacgactcactataggcactgtcagcagtggccgaaggctcccagggccctcgggcagcagcccttgctgaccagtgcagccaggtcgtggctgcctccagctggtgggtctgccttccccttcagttggatacagatcaggtcag

SEQ ID NO: 1050 - DNA, 150 bp, Artificial Sequence
  Synthetic polynucleotide
ctaatacgactcactataggcactgtgcgcggcggctctacccagcgccgcggtcctggctctggccagacgtgggggaagccggttgcggctgtccctcccgggccgcggttccctagctccccctcagttggatacagatcaggtcag

SEQ ID NO: 1051 - DNA, 150 bp, Artificial Sequence
  Synthetic polynucleotide
ctaatacgactcactataggcactgtgggttgcgggtccgcttggcagagcgggcgcccggcccgcggcggcctccttcccgggctgtggggctccgaggggccggcgcgcagcgaggacaaggtttcagttggatacagatcaggtcag

SEQ ID NO: 1052 - DNA, 150 bp, Artificial Sequence
  Synthetic polynucleotide
ctaatacgactcactataggcactgtccgggctggggggcaccggcgggcggggcgaccgggagcccggggacccagcccggccgcgcgggtcagtgaaggcgaacgcggcgccgcagagcccacatcagttggatacagatcaggtcag

SEQ ID NO: 1053 - DNA, 150 bp, Artificial Sequence
  Synthetic polynucleotide
ctaatacgactcactataggcactgttaacagtatacaatcattattgttaccattatttgtaaagagatatttgtgaaatatatttgtaatatatttcacaaatatctctttacaaataatggtatcagttggatacagatcaggtcag

SEQ ID NO: 1054 - DNA, 150 bp, Artificial Sequence
  Synthetic polynucleotide
ctaatacgactcactataggcactgtctccctcccggacggggcggctggccgggcagaggggctcctcacttcccagtaggggcggccgggcagaggcgcccctcacctcccagacggggcggcttcagttggatacagatcaggtcag

SEQ ID NO: 1055 - DNA, 150 bp, Artificial Sequence
  Synthetic polynucleotide
ctaatacgactcactataggcactgtcacctgtaatcccagccctctgggaggccgaggcgggtggatcacctgaggtcaggagtttgaaaccagcccggccaacatggtgaaaccccaagtctactcagttggatacagatcaggtcag

SEQ ID NO: 1056 - DNA, 150 bp, Artificial Sequence
  Synthetic polynucleotide
ctaatacgactcactataggcactgtccggccagccgccccgtccgggaggtgaggggcgcctctgcccggccgcccctactgggaagtgaggagcccctctgcccggccagccgccctgtccgggtcagttggatacagatcaggtcag

SEQ ID NO: 1057 - DNA, 150 bp, Artificial Sequence
  Synthetic polynucleotide
ctaatacgactcactataggcactgtaatgcgcagccggagagcatctcccgagccagagcgagcctgacgcgcgcccagcgggcggcgggcagcggcgagctggggcgggcggagggccggctcctcagttggatacagatcaggtcag

SEQ ID NO: 1058 - DNA, 150 bp, Artificial Sequence
  Synthetic polynucleotide
ctaatacgactcactataggcactgtaccgcgccgccccggagccgctttcaggacccgctgcgtgtggacagcgccgcccggggctcagctccctccgggcgggggcggggcgggggctaacctgtcagttggatacagatcaggtcag

SEQ ID NO: 1059 - DNA, 150 bp, Artificial Sequence
  Synthetic polynucleotide
ctaatacgactcactataggcactgtatgctttgggccccagagtggtgtatactggcactggtgttagcaggtccaggcaggccaattcctgggactccagctggcttgctggagtgccaggaattcagttggatacagatcaggtcag

SEQ ID NO: 1060 - DNA, 150 bp, Artificial Sequence
  Synthetic polynucleotide
ctaatacgactcactataggcactgttttttgagacagagtctcactctgtcacccaggctggagtgcagtggcgcaatcttggctcactgcaaacttctgcctcccaggttgaagcaattctccttcagttggatacagatcaggtcag

SEQ ID NO: 1061 - DNA, 150 bp, Artificial Sequence
  Synthetic polynucleotide
ctaatacgactcactataggcactgtcttgataatggaatcagttcttaagtaatttttatagatgtttaataaataacattattaaatgttatagatgtttaataatgttatttattaaacatcttcagttggatacagatcaggtcag

SEQ ID NO: 1062 - DNA, 150 bp, Artificial Sequence
  Synthetic polynucleotide
ctaatacgactcactataggcactgtccgcggccgccgccgctgctgctgcgccgcccttgccgggttcgcctcccgggcccccgggccccgccgcccccggagctccagccgggctgggcccgcctcagttggatacagatcaggtcag

SEQ ID NO: 1063 - DNA, 150 bp, Artificial Sequence
  Synthetic polynucleotide
ctaatacgactcactataggcactgttatgagggctgtaaggagtgcctctagtgatgctagaggtactctcaagaagcagagaaacgtcatgacgttacaagcaaaagttgaattgcttgatgtgtcagttggatacagatcaggtcag

SEQ ID NO: 1064 - DNA, 150 bp, Artificial Sequence
  Synthetic polynucleotide
ctaatacgactcactataggcactgttgcatgtagatacatgtatacgtagatacatgtatacatgtagatacatgtagatacatgtatacatgtagatacatgtagatacatgtatacatgtagatcagttggatacagatcaggtcag

SEQ ID NO: 1065 - DNA, 150 bp, Artificial Sequence
  Synthetic polynucleotide
ctaatacgactcactataggcactgtatggcgggcgccgcgtccccttgcgccaacggctgcgggcccggcgcgccctcggacgccgaggtgctgcacctctgccgcagcctcgaggtgggcaccgtcagttggatacagatcaggtcag

SEQ ID NO: 1066 - DNA, 150 bp, Artificial Sequence
  Synthetic polynucleotide
ctaatacgactcactataggcactgttgggcggcctcctggccttcgccaaacgccgcaactgctgcattggctgccgcacagtgctcagccaccagggtgagcggccctggccactgggcccccatcagttggatacagatcaggtcag

SEQ ID NO: 1067 - DNA, 150 bp, Artificial Sequence
  Synthetic polynucleotide
ctaatacgactcactataggcactgtggcggtcggggcgcgccgccctaccccagtcaggcgcggcgagtgcgggcggctgcgggaaccgggcctccctcccgcctcggcggcgccagccgaggactcagttggatacagatcaggtcag

SEQ ID NO: 1068 - DNA, 150 bp, Artificial Sequence
  Synthetic polynucleotide
ctaatacgactcactataggcactgtaggctgaggcaggagaatggcgtgaacccaggaggcggagcttgcagtgagctaagatcatgccactgcactccagcctgggtgacagagcaagactccgtcagttggatacagatcaggtcag

SEQ ID NO: 1069 - DNA, 150 bp, Artificial Sequence
  Synthetic polynucleotide
ctaatacgactcactataggcactgttatatatatgtatatgtatatgtgtgtgtgtgtatatatatatatacacacacacacatatacatatacatatgtaggtaggtagataggtatctccagatcagttggatacagatcaggtcag

SEQ ID NO: 1070 - DNA, 150 bp, Artificial Sequence
  Synthetic polynucleotide
ctaatacgactcactataggcactgtggcccacctcttgggcatccccagcttcaagttggggttcccacgaccccctctttgggtttgattaatttgctggagcggctcacagaactccaggaaatcagttggatacagatcaggtcag

SEQ ID NO: 1071 - DNA, 150 bp, Artificial Sequence
  Synthetic polynucleotide
ctaatacgactcactataggcactgtccatcccgagggcactgccgcgggggctcggctccgactgcgggagacccagggatggggtggggagccgagccttctaaataaagctgttacagctgcgtcagttggatacagatcaggtcag

SEQ ID NO: 1072 - DNA, 150 bp, Artificial Sequence
  Synthetic polynucleotide
ctaatacgactcactataggcactgtgcatcaggacctcccccgtaggggaggtcgtgtgtttggggtccttacacaacaggttacccttgagcttcaggaaaagaactggctctcagttccccagtcagttggatacagatcaggtcag

SEQ ID NO: 1073 - DNA, 150 bp, Artificial Sequence
  Synthetic polynucleotide
ctaatacgactcactataggcactgtccgagcgggactatgtgggcacgctggagttcctggtgtcggtgagtgtccccggcagacgcagggggacgtccgggcggcgcggggcgcgggtcccggatcagttggatacagatcaggtcag

SEQ ID NO: 1074 - DNA, 150 bp, Artificial Sequence
  Synthetic polynucleotide
ctaatacgactcactataggcactgtctcagggcacgccctccccgcggcctgcttggctaaggtctggggcatcccctctgccaccggcagagggggccccggggagcacgtggggtcagcggggtcagttggatacagatcaggtcag

SEQ ID NO: 1075 - DNA, 150 bp, Artificial Sequence
  Synthetic polynucleotide
ctaatacgactcactataggcactgtgcagccctatatagggcatgctgttctcaaagcagagggagggcagaagctcaaggtggacagagccaaaccacacaggcaaccatggtatggcatgtcctcagttggatacagatcaggtcag

SEQ ID NO: 1076 - DNA, 150 bp, Artificial Sequence
  Synthetic polynucleotide
ctaatacgactcactataggcactgtgagaagaaagccgggccgcggagcggggccgggagaggccagccccggggcgcctctcggggcgcggcccaggcggacagcggcagcggcggcgggcccgtcagttggatacagatcaggtcag

SEQ ID NO: 1077 - DNA, 150 bp, Artificial Sequence
  Synthetic polynucleotide
ctaatacgactcactataggcactgtgtctggggtgcagtggcaggatctcggctcactggaacctctgcctcccaggttcaggcgattctcctgcctgaacctcccaagcagctgggattataggtcagttggatacagatcaggtcag

SEQ ID NO: 1078 - DNA, 150 bp, Artificial Sequence
  Synthetic polynucleotide
ctaatacgactcactataggcactgtaatcagcctggagctgagtgggccgtgggggctgcctgtgccctgcccccgaagcatggacgggcacagcggccgcattgccccagcagtgggacggtgatcagttggatacagatcaggtcag

SEQ ID NO: 1079 - DNA, 150 bp, Artificial Sequence
  Synthetic polynucleotide
ctaatacgactcactataggcactgtcgggcttcgggctcccgccccgggtcggggttgggggccggttccctcctcgtcccctcgccctccaggggccgggggccggccccaccgcgcccccacctcagttggatacagatcaggtcag

SEQ ID NO: 1080 - DNA, 150 bp, Artificial Sequence
  Synthetic polynucleotide
ctaatacgactcactataggcactgtccacaggccagcattggtccatggcctggtcacagcaggaggtgagcaaggagctagcattgccacctgagctccacctcctgtcagatcagcagcagcatcagttggatacagatcaggtcag

SEQ ID NO: 1081 - DNA, 150 bp, Artificial Sequence
  Synthetic polynucleotide
ctaatacgactcactataggcactgtctctagaatagtggccaagccacctcagccacttcatggctgtgggctttgtgcaaagcccttaagcttttggaccttcattttctagtctggaagtagatcagttggatacagatcaggtcag

SEQ ID NO: 1082 - DNA, 150 bp, Artificial Sequence
  Synthetic polynucleotide
ctaatacgactcactataggcactgtactggggcccaggcaggccggcgtccgccgcggtctcgcgtaggcggtgggcctgggcctgtgtcgcggggcgggggccgcgggcgggcgcccccaccggtcagttggatacagatcaggtcag

SEQ ID NO: 1083 - DNA, 150 bp, Artificial Sequence
  Synthetic polynucleotide
ctaatacgactcactataggcactgtggtggtggtggaggcatagctgactcatctatgtttgttctgctggcctccatcactgactcctggaggcggcttggctcttcaataatgggctcatctgtcagttggatacagatcaggtcag

SEQ ID NO: 1084 - DNA, 150 bp, Artificial Sequence
  Synthetic polynucleotide
ctaatacgactcactataggcactgtacttagcataatggtctccctgtccacctcggctcccgcgcggggaggaggggcaagggccctccgcccgggccccgcctccccgcgcgccgctgccacctcagttggatacagatcaggtcag

SEQ ID NO: 1085 - DNA, 150 bp, Artificial Sequence
  Synthetic polynucleotide
ctaatacgactcactataggcactgtgggggagtcctgccagcacccagctgggccttgcctcgggaggcaaggaccaggacgaggcccgagggctcgcgtctggggcatacttgtgccgctgcagtcagttggatacagatcaggtcag

SEQ ID NO: 1086 - DNA, 150 bp, Artificial Sequence
  Synthetic polynucleotide
ctaatacgactcactataggcactgtaggactggtgaactatcttagggatcttctgtgaagatcccaattaatgagggtcagagggccacagaggggcttctgagcctctaaaacaacctggccttcagttggatacagatcaggtcag

SEQ ID NO: 1087 - DNA, 150 bp, Artificial Sequence
  Synthetic polynucleotide
ctaatacgactcactataggcactgtcccagttagcaaatgggtaattatatgacatcagccaccatggggtggctgggacataaggtggcttcatggtgccatataatgtggcaccaagtttctttcagttggatacagatcaggtcag

SEQ ID NO: 1088 - DNA, 150 bp, Artificial Sequence
  Synthetic polynucleotide
ctaatacgactcactataggcactgtatgggccgccgccccgcccgttggtgagtcttgaatccgtgtactttcactgctgggaaacgggcggggaaagaagtgcctatggccgctgaaaacaatttcagttggatacagatcaggtcag

SEQ ID NO: 1089 - DNA, 150 bp, Artificial Sequence
  Synthetic polynucleotide
ctaatacgactcactataggcactgtctggcaagcggccgggcgtgagaggtcgcaagcagtcgacctcagcctagctggggaacgccagaatggaggggggctgcaggtcctcgggtcccactcgtcagttggatacagatcaggtcag

SEQ ID NO: 1090 - DNA, 150 bp, Artificial Sequence
  Synthetic polynucleotide
ctaatacgactcactataggcactgtcgtggaggcctttcccgggcgggcccggactgcgcggagctgtcgggacgcgccgcgggctctggcggacgccagggggcagcagccgccctccctggactcagttggatacagatcaggtcag

SEQ ID NO: 1091 - DNA, 150 bp, Artificial Sequence
  Synthetic polynucleotide
ctaatacgactcactataggcactgttgaatagccccgacctcccgtgcctctcccgtctcttacaaacggaaactttgtcagaggagggagaggcagggaggttgaggagccttgaaaggctttttcagttggatacagatcaggtcag

SEQ ID NO: 1092 - DNA, 150 bp, Artificial Sequence
  Synthetic polynucleotide
ctaatacgactcactataggcactgtagccaggcatggtggcatgtgcctgtagttccagcacctcaggagactgaggtgggaggactgcttgagcccagcagttcaaggctgctgtaagctatcatcagttggatacagatcaggtcag

SEQ ID NO: 1093 - DNA, 150 bp, Artificial Sequence
  Synthetic polynucleotide
ctaatacgactcactataggcactgtaaaaataaccaggcgcggtggctcacgcctgtaatcccagcactctgggaggctgaggcaggtggatcacgagctcaggagatcgagaccatcctggctatcagttggatacagatcaggtcag

SEQ ID NO: 1094 - DNA, 150 bp, Artificial Sequence
  Synthetic polynucleotide
ctaatacgactcactataggcactgtaggcgtgagccactgcgcccgtccagggttcttaactttgaaaaacaacctcagtggctgggcgcagtggctcatgccagtaatcccagcacttagggagtcagttggatacagatcaggtcag

SEQ ID NO: 1095 - DNA, 150 bp, Artificial Sequence
  Synthetic polynucleotide
ctaatacgactcactataggcactgtcgccgcggagggcctgcgcgccgccccgtggacgggctccggccggcggggaggacttggtggctggtgcctgcgggggcgggagggggcggaggagaaatcagttggatacagatcaggtcag

SEQ ID NO: 1096 - DNA, 150 bp, Artificial Sequence
  Synthetic polynucleotide
ctaatacgactcactataggcactgtaccggcactggcactgcgctggggcccggagggtggcccaggctgtgcagggacggcagcccagggggcggcgggctgaggagcagtgcggggctggatgtcagttggatacagatcaggtcag

SEQ ID NO: 1097 - DNA, 150 bp, Artificial Sequence
  Synthetic polynucleotide
ctaatacgactcactataggcactgtgtataatatatgttatatatattatacataatatgtataatatatattatatatattatataatatatattatatattatgtataatatatataatatattcagttggatacagatcaggtcag

SEQ ID NO: 1098 - DNA, 150 bp, Artificial Sequence
  Synthetic polynucleotide
ctaatacgactcactataggcactgtaacgtctgtgccagcttggaacaggactgaaaactgaggccagccaatgcgttaggctggcagggggccagccatggattaagtgccctatggcacttgatcagttggatacagatcaggtcag

SEQ ID NO: 1099 - DNA, 150 bp, Artificial Sequence
  Synthetic polynucleotide
ctaatacgactcactataggcactgtttgagacggagtcttgctctgttgcccaggctggagtgcagtggtgccatcttggctcactgcaacctccgcctcctgggtttaagggattctcctgtcttcagttggatacagatcaggtcag

SEQ ID NO: 1100 - DNA, 150 bp, Artificial Sequence
  Synthetic polynucleotide
ctaatacgactcactataggcactgtcaaaatcccacttcctgtcagggggccaggtgcctgtgcgggctctcctggccacatcaggaggggccgtgggcttggggttgccccccggccccccatctcagttggatacagatcaggtcag

SEQ ID NO: 1101 - DNA, 150 bp, Artificial Sequence
  Synthetic polynucleotide
ctaatacgactcactataggcactgtggggcgcgttctcgccctccccgggctcggccccgcgggagccccggggcgggcccatgcgccgagagcgcgcgtctccattcatcggggcgggcgggcgtcagttggatacagatcaggtcag

SEQ ID NO: 1102 - DNA, 150 bp, Artificial Sequence
  Synthetic polynucleotide
ctaatacgactcactataggcactgtatgggcccggctccgggtcaagggctgtaccgctccccgatgcccggagcggcctatccggtgagtggggcaggaggaggggcgcgcgggccgggggcggtcagttggatacagatcaggtcag

SEQ ID NO: 1103 - DNA, 150 bp, Artificial Sequence
  Synthetic polynucleotide
ctaatacgactcactataggcactgtatggccgctgcccgcccagcgcgggggccggagctcccgctcctggggctgctgctgctgctgctgctgggggacccgggccggggggcggcctcgagcgtcagttggatacagatcaggtcag

SEQ ID NO: 1104 - DNA, 150 bp, Artificial Sequence
  Synthetic polynucleotide
ctaatacgactcactataggcactgttcaaatctggaaggggaaggagctcaggtagtcgcggaggacggggttgagggggatgcgagccaggttctcgcggcccacggtggccacgatgcgctggtcagttggatacagatcaggtcag

SEQ ID NO: 1105 - DNA, 150 bp, Artificial Sequence
  Synthetic polynucleotide
ctaatacgactcactataggcactgtcctgccttggcctcccaaagtgctaggattataggcatgagccaccatgcctgaccaagctcatgcctgtaaacagtttgggaggctgaggcaggaggattcagttggatacagatcaggtcag

SEQ ID NO: 1106 - DNA, 150 bp, Artificial Sequence
  Synthetic polynucleotide
ctaatacgactcactataggcactgtggtctccctctgttgcccaggctggagtgcagtggtagcggtgtgatcacagctcactgtagcctccaactcctgggcttaagcaatcctcctgcttcactcagttggatacagatcaggtcag

SEQ ID NO: 1107 - DNA, 150 bp, Artificial Sequence
  Synthetic polynucleotide
ctaatacgactcactataggcactgtcatcagggcagcacagtgcagagcccagggcagtgcgaagcccagggcagtgtggaggcaggcgcctgctgcactctcgccctgggcagcacctgctgtttcagttggatacagatcaggtcag

SEQ ID NO: 1108 - DNA, 150 bp, Artificial Sequence
  Synthetic polynucleotide
ctaatacgactcactataggcactgtcagacgccatttccccagtcgcgaggcggggtcctccgccccgcgccgcccacaccccggccactcccgggtcgcagacggcggaagctcgcggggtggctcagttggatacagatcaggtcag

SEQ ID NO: 1109 - DNA, 150 bp, Artificial Sequence
  Synthetic polynucleotide
ctaatacgactcactataggcactgtcgagacagagtttcgctctgtcacccaggctggagtgcagtggtgtgatctcggctcactgcagcctccacctcctgggttcaagcaattttcctgcctctcagttggatacagatcaggtcag

SEQ ID NO: 1110 - DNA, 150 bp, Artificial Sequence
  Synthetic polynucleotide
ctaatacgactcactataggcactgtacagtatctcactctatcagccaggctggagtgcggtggcatgatcaccgctcactacagccttgaactccttggctcaggtgatcctcccacctcagcctcagttggatacagatcaggtcag

SEQ ID NO: 1111 - DNA, 150 bp, Artificial Sequence
  Synthetic polynucleotide
ctaatacgactcactataggcactgtagcctcctgactctgagccgtcccctctgggggcacacgggtgctggggcagctggggaggaggcctgcctgcctcctgcccgcctgcctcacagggctgtcagttggatacagatcaggtcag

SEQ ID NO: 1112 - DNA, 150 bp, Artificial Sequence
  Synthetic polynucleotide
ctaatacgactcactataggcactgtgagggccgtggccttccctggttccccggaagtcagccattgtggcaatggctgcgcagcttgctgaaaggggccctgagccctggcccctgtgtcttggtcagttggatacagatcaggtcag

SEQ ID NO: 1113 - DNA, 150 bp, Artificial Sequence
  Synthetic polynucleotide
ctaatacgactcactataggcactgtttacaggcgtgagccaccgtgcctggccaggactacgagtttaaaacctccttagtccctttggctttaagaacaaagaggctggtggctcatgcctgtatcagttggatacagatcaggtcag

SEQ ID NO: 1114 - DNA, 150 bp, Artificial Sequence
  Synthetic polynucleotide
ctaatacgactcactataggcactgttgggattacaggcatgagccaccatgtgcagcctaaaattttattagaaggctcatggtggctcatgcctgtaatcccagcactttgggaggctgaggtgtcagttggatacagatcaggtcag

SEQ ID NO: 1115 - DNA, 150 bp, Artificial Sequence
  Synthetic polynucleotide
ctaatacgactcactataggcactgtccagggcggcgactttgccgtccaggggccccgcggccgccgccatggagggcagggcggtggtgagcagactgctgccgtccgggaccggcaccgggattcagttggatacagatcaggtcag

SEQ ID NO: 1116 - DNA, 150 bp, Artificial Sequence
  Synthetic polynucleotide
ctaatacgactcactataggcactgtccgccctcaaccccagccggacgccgaccccggggaggcccacctggcggaaggagggggcggcggggggcggccgtgcgtcccagggcacgcacaccagtcagttggatacagatcaggtcag

SEQ ID NO: 1117 - DNA, 150 bp, Artificial Sequence
  Synthetic polynucleotide
ctaatacgactcactataggcactgttggtctggaactcctgacctcgggtgatccgcccgcctcggcctcccagagtgctgggattacaggcatgagccactgtgcccagcctgaaatatttttttcagttggatacagatcaggtcag

SEQ ID NO: 1118 - DNA, 150 bp, Artificial Sequence
  Synthetic polynucleotide
ctaatacgactcactataggcactgtggtccccagcccgggctcggcggggcgccgggggtcttcctggggtccccgcctctccgctgcgcttgacagtcgggcccggcaacccggcccccgggcgtcagttggatacagatcaggtcag

SEQ ID NO: 1119 - DNA, 150 bp, Artificial Sequence
  Synthetic polynucleotide
ctaatacgactcactataggcactgtaggggctccctggcatggcgctcggggcctctcggggagaagcctatgagcccttggcgtggaaccctgaggagtccactggggggcctcattcggcccctcagttggatacagatcaggtcag

SEQ ID NO: 1120 - DNA, 150 bp, Artificial Sequence
  Synthetic polynucleotide
ctaatacgactcactataggcactgtaagcaggcccagagggaggctgcctccagatcccctgtcccctggggctgtgggtgtccctgaatgtcagggccatgggagggcccctgggcttcaggggtcagttggatacagatcaggtcag

SEQ ID NO: 1121 - DNA, 150 bp, Artificial Sequence
  Synthetic polynucleotide
ctaatacgactcactataggcactgtttgcccaggcgggagtgcaatggtgcaatcttggctgattgcaatctccgcctctggggttcaagtgattcttgtgcctcagcctcccgagtagctgggatcagttggatacagatcaggtcag

SEQ ID NO: 1122 - DNA, 150 bp, Artificial Sequence
  Synthetic polynucleotide
ctaatacgactcactataggcactgttggccaggtgtggtgtctcacacctttaatcccaacactttgggaggctgaggcaggtggatcacctgaggtcgggagtttgagaccagcccgaccaacatcagttggatacagatcaggtcag

SEQ ID NO: 1123 - DNA, 150 bp, Artificial Sequence
  Synthetic polynucleotide
ctaatacgactcactataggcactgtgcctcccctggccttgcctacactagtcaagatcaggggtcttgtgtgtggcaggggctgctgtcacccctgcccacccctggcccagggcagcaggggctcagttggatacagatcaggtcag

SEQ ID NO: 1124 - DNA, 150 bp, Artificial Sequence
  Synthetic polynucleotide
ctaatacgactcactataggcactgtttgcagaatggagaaaggacctcagggactccaaatacttaatataggactccctgaagtcctttctccattttgcaaagccagatttatatatatgctatcagttggatacagatcaggtcag

SEQ ID NO: 1125 - DNA, 150 bp, Artificial Sequence
  Synthetic polynucleotide
ctaatacgactcactataggcactgtcctcccaaagtgctgggattacaggcatgagccaccacacctggccgtggtgtttgattaaaaaccaggcatcagccgggtgtggtggctcatgcccgtatcagttggatacagatcaggtcag

SEQ ID NO: 1126 - DNA, 150 bp, Artificial Sequence
  Synthetic polynucleotide
ctaatacgactcactataggcactgtggcaactttcagcgcggctcgaggcggcttccgggagtcggcgactcggaggcccggacgtcgggcgatcagccagtccggaccccaaggccggagaaagtcagttggatacagatcaggtcag

SEQ ID NO: 1127 - DNA, 150 bp, Artificial Sequence
  Synthetic polynucleotide
ctaatacgactcactataggcactgtcacggaggcgtgtgtgccgagtggggtccgtggcctgctggcccctgtcctaggggtggccgcatggtcccaggtgcggccgctatagacatagccccagtcagttggatacagatcaggtcag

SEQ ID NO: 1128 - DNA, 150 bp, Artificial Sequence
  Synthetic polynucleotide
ctaatacgactcactataggcactgtgcgccgaggagtccggcccggaagagtccggcccggaggaactgggcgccgaggaggagatggaggccgggcggccgcggcccgtgctgcgctcggtgaatcagttggatacagatcaggtcag

SEQ ID NO: 1129 - DNA, 150 bp, Artificial Sequence
  Synthetic polynucleotide
ctaatacgactcactataggcactgtgcggcggagccggtggcggcgcggggccgcccaacgacccgtaagccgaagcgcccgggggcgcaaagtccagcaccggcgcccactgcgccgcgccgcttcagttggatacagatcaggtcag

SEQ ID NO: 1130 - DNA, 150 bp, Artificial Sequence
  Synthetic polynucleotide
ctaatacgactcactataggcactgtccaggcagtggctcatgcctgtaatctcaacaggcatggaggccgaggcgggaggaccaaaaggtcaggaaatcgagaccttcctggctaacatagtgaatcagttggatacagatcaggtcag

SEQ ID NO: 1131 - DNA, 150 bp, Artificial Sequence
  Synthetic polynucleotide
ctaatacgactcactataggcactgtctcgtgacttggactcaaaggcagtggccttcccagcggcccgcgaggggctgggaggttcccagcatggcactggggctggcagcaggccctccgcacatcagttggatacagatcaggtcag

SEQ ID NO: 1132 - DNA, 150 bp, Artificial Sequence
  Synthetic polynucleotide
ctaatacgactcactataggcactgtgcccaggctggagtgcagtggcacgatcttggctcactgcagcctccgccccctgggttcaagcagttctcctgctgcagcctcccgagtagctgggatttcagttggatacagatcaggtcag

SEQ ID NO: 1133 - DNA, 150 bp, Artificial Sequence
  Synthetic polynucleotide
ctaatacgactcactataggcactgtacagctgacccagccaagtccccaaagcccagcaatggggctggggtccccaatggagccctccgggagtccgggggctcaggcttccggtctccccacctcagttggatacagatcaggtcag

SEQ ID NO: 1134 - DNA, 150 bp, Artificial Sequence
  Synthetic polynucleotide
ctaatacgactcactataggcactgtaggagaatcgcctgaacccaggaggcgtaggttgcagtgagccgagatagtgccactgcactatagcctggtgacagacagagactctgtctccaaaaagtcagttggatacagatcaggtcag

SEQ ID NO: 1135 - DNA, 150 bp, Artificial Sequence
  Synthetic polynucleotide
ctaatacgactcactataggcactgtagacagagtctcgctctgtcacccaggctggagtgcagtggcatgatcttggctcactgcagcctctgccttccaagttcaagtgattctcctggctcagtcagttggatacagatcaggtcag

SEQ ID NO: 1136 - DNA, 150 bp, Artificial Sequence
  Synthetic polynucleotide
ctaatacgactcactataggcactgtgccaggcctgcccagggggtgtctccacccctgagctggacaaccagctgagggcctgggcaggtgggcccgccaggttacagggtatgggtggggtctgtcagttggatacagatcaggtcag

SEQ ID NO: 1137 - DNA, 150 bp, Artificial Sequence
  Synthetic polynucleotide
ctaatacgactcactataggcactgtcctctgactccagccactgagctgggcaacacccctctccactggcaatagttgggagaggggtgttgccatattgccaggctacccagggcagggcagatcagttggatacagatcaggtcag

SEQ ID NO: 1138 - DNA, 150 bp, Artificial Sequence
  Synthetic polynucleotide
ctaatacgactcactataggcactgttcagccacagctttctctgtggctccagccacagatgtcttacatctggagcctgtctccaaagccccatgggcactctgagagctgggaaattggcaggtcagttggatacagatcaggtcag

SEQ ID NO: 1139 - DNA, 150 bp, Artificial Sequence
  Synthetic polynucleotide
ctaatacgactcactataggcactgtgtgacaaccaaaaatgtctccaagatgttgtcaaatgtgtcccgatgggggcaaaattgcccccagttgagaaccattgacttatagagaatgatgcatttcagttggatacagatcaggtcag

SEQ ID NO: 1140 - DNA, 150 bp, Artificial Sequence
  Synthetic polynucleotide
ctaatacgactcactataggcactgtcggcggcggcggcggcggcgaggcgggagctgtagccccctacggctacactcggccccctcaggggctggcgggccaggaaagcgacttcaccgcaccttcagttggatacagatcaggtcag

SEQ ID NO: 1141 - DNA, 150 bp, Artificial Sequence
  Synthetic polynucleotide
ctaatacgactcactataggcactgtaggcggggggcgaggcggcggcggcggcagcggccgagcgcggggaaatgaaggcagccgccgggcaggaaagcgagggccccgccgtggggccgccgcatcagttggatacagatcaggtcag

SEQ ID NO: 1142 - DNA, 150 bp, Artificial Sequence
  Synthetic polynucleotide
ctaatacgactcactataggcactgtgcggggcgccagcctgagccccgcgcccgccccgctcccgcgccgcccgcccgctcgctcgcgagtcagctctgccgccgctgccgctctagcacaggcgtcagttggatacagatcaggtcag

SEQ ID NO: 1143 - DNA, 150 bp, Artificial Sequence
  Synthetic polynucleotide
ctaatacgactcactataggcactgtgggattacaggtgtgagccactgtgtccagccaacattattcacttttgttgttacataagatgtcacggccaggcatggtgggtcacgcctgtaatccctcagttggatacagatcaggtcag

SEQ ID NO: 1144 - DNA, 150 bp, Artificial Sequence
  Synthetic polynucleotide
ctaatacgactcactataggcactgtttcctctgggaaggttcgtcccagagcggcacccgccagatggcagcgggagctcttctgtatgaggtgtctgtcgacccctgctgggaggtgtctcccatcagttggatacagatcaggtcag

SEQ ID NO: 1145 - DNA, 150 bp, Artificial Sequence
  Synthetic polynucleotide
ctaatacgactcactataggcactgttccgccggggcctcctcccgggcctccgttcccgccgcggccccggttccggcgggggcagcctccgggttcggggctccttctcctggggacgctggggtcagttggatacagatcaggtcag

SEQ ID NO: 1146 - DNA, 150 bp, Artificial Sequence
  Synthetic polynucleotide
ctaatacgactcactataggcactgtttccaggagccacagcattctctggcgctgcgtgcctggcagggctgctggggctatcccagcctagtgccaggcctgttccccagccagtgcgggctgatcagttggatacagatcaggtcag

SEQ ID NO: 1147 - DNA, 150 bp, Artificial Sequence
  Synthetic polynucleotide
ctaatacgactcactataggcactgtcagctgcagccgcccaaccacggctgcaaacccaggcatccctgctctttccagggccgggaaggccccctgccctcacagacttggaaatgcctgctcctcagttggatacagatcaggtcag

SEQ ID NO: 1148 - DNA, 150 bp, Artificial Sequence
  Synthetic polynucleotide
ctaatacgactcactataggcactgtcaccagcggaggctggagaacagcaaatattgctgcctgctccttcctctgggagcttcgtcccagaagggcaccagcctgatgcccacgggagctctcctcagttggatacagatcaggtcag

SEQ ID NO: 1149 - DNA, 150 bp, Artificial Sequence
  Synthetic polynucleotide
ctaatacgactcactataggcactgtgggtgggcgtgggcttggtgggcccggcactcagagcagccggccagccctgccggccgcgggcaatgaggggcttagcacccgggccagcggctgcggatcagttggatacagatcaggtcag

SEQ ID NO: 1150 - DNA, 150 bp, Artificial Sequence
  Synthetic polynucleotide
ctaatacgactcactataggcactgtctgcccaggtccagttgctcacctgggcagaaagcaggggccacaaaagggaggcctcctgagccaccggttcaccctggggaaagcaagctggttcctctcagttggatacagatcaggtcag

SEQ ID NO: 1151 - DNA, 150 bp, Artificial Sequence
  Synthetic polynucleotide
ctaatacgactcactataggcactgtgagatgttctgctccactaggttggccagcatgcctgcgaagaggtagagacccttgagcaggtgctggctgcctcaggccaggagctgaggctctcatgtcagttggatacagatcaggtcag

SEQ ID NO: 1152 - DNA, 150 bp, Artificial Sequence
  Synthetic polynucleotide
ctaatacgactcactataggcactgtttctgctggggcggggggcccatgagggagccctgcggggagagcatgtggggcggctggctgtagacctcgccccccacgccccgctgcttcatcagcatcagttggatacagatcaggtcag

SEQ ID NO: 1153 - DNA, 150 bp, Artificial Sequence
  Synthetic polynucleotide
ctaatacgactcactataggcactgtgctgctgtcacctgagactttgcgtttcctgtccacccggagggtggggctgtgaggcatgtccgaggccacctggtctgcgggaggctcgctcacaggctcagttggatacagatcaggtcag

SEQ ID NO: 1154 - DNA, 150 bp, Artificial Sequence
  Synthetic polynucleotide
ctaatacgactcactataggcactgtggcacctgcaagctcagctactcgggaggctgaggcaccagaatcacttgaacctgggaggcagaggttacagtgaactgagatcatcccactgccctcctcagttggatacagatcaggtcag

SEQ ID NO: 1155 - DNA, 150 bp, Artificial Sequence
  Synthetic polynucleotide
ctaatacgactcactataggcactgtgaggccgcggcgccggcgccggcgccggcctcgggctccatgtccccgttgaacagagcctggcccggctccgcgccgccaccaccgccaccgctcagcgtcagttggatacagatcaggtcag

SEQ ID NO: 1156 - DNA, 150 bp, Artificial Sequence
  Synthetic polynucleotide
ctaatacgactcactataggcactgttattttattattaaagaataagagtacaggccgggtgcggtggctcaggcctgtaatcccagcactttgggaggccaaggtgggcggatcacctgaggtctcagttggatacagatcaggtcag

SEQ ID NO: 1157 - DNA, 150 bp, Artificial Sequence
  Synthetic polynucleotide
ctaatacgactcactataggcactgttcagtattcgtatacagatttgatatcttggtatacagattcgatatctctgaatctgtataccaagaaatcatgttttaagggtctcaatatattttcatcagttggatacagatcaggtcag

SEQ ID NO: 1158 - DNA, 150 bp, Artificial Sequence
  Synthetic polynucleotide
ctaatacgactcactataggcactgtaatcccagctactcgggaggctgaggcaagagaatcgcttgaacctggctggcggaggttgcagtgagccgagatcgcgccactgcactccagcctgggttcagttggatacagatcaggtcag

SEQ ID NO: 1159 - DNA, 150 bp, Artificial Sequence
  Synthetic polynucleotide
ctaatacgactcactataggcactgtgacctgcctgctggctggcaggggtgtagcacccatgtactcagggacagcacgcgcccggcttcctggctgcctcacgtgtgctgcaggctggccctgctcagttggatacagatcaggtcag

SEQ ID NO: 1160 - DNA, 150 bp, Artificial Sequence
  Synthetic polynucleotide
ctaatacgactcactataggcactgtatgctgctatccgtgccgctgctgctcggcctcctcggcctggccgtcgccgagcctgccgtctacttcaaggagcagtttctggacggaggtaacgccttcagttggatacagatcaggtcag

SEQ ID NO: 1161 - DNA, 150 bp, Artificial Sequence
  Synthetic polynucleotide
ctaatacgactcactataggcactgtagtgggtgccagggggcacctggcttctggtttggggccccacagggaggtggcgactggtcacagccctcagtgggtgccagggggcacctggcttcagtcagttggatacagatcaggtcag

SEQ ID NO: 1162 - DNA, 150 bp, Artificial Sequence
  Synthetic polynucleotide
ctaatacgactcactataggcactgtacctcctggacggggcggctggccaggcggggggctgaccccccacctccctcccggactgggcggctggccgggcggggggttgaacccccacctcccttcagttggatacagatcaggtcag

SEQ ID NO: 1163 - DNA, 150 bp, Artificial Sequence
  Synthetic polynucleotide
ctaatacgactcactataggcactgtgtctcgctctgtcgcccaggttggagtgcagtggtgcgatctcgactcactgcaacctccgcctcctgggagtaatcccagcctcccgagtagctgggattcagttggatacagatcaggtcag

SEQ ID NO: 1164 - DNA, 150 bp, Artificial Sequence
  Synthetic polynucleotide
ctaatacgactcactataggcactgtgccgggcatggtggctcacgcctgtaatcccagcactttgggagggcgaggcgggtggatcacctgaggtcaggagtttgatcctgaccaacatggagaatcagttggatacagatcaggtcag

SEQ ID NO: 1165 - DNA, 150 bp, Artificial Sequence
  Synthetic polynucleotide
ctaatacgactcactataggcactgttggctcctcagcccaggcagggagaggccagggagccaagagtttgaacccagtgccactcctgactgcctggtgatgctggcaacccgcctgccctccctcagttggatacagatcaggtcag

SEQ ID NO: 1166 - DNA, 150 bp, Artificial Sequence
  Synthetic polynucleotide
ctaatacgactcactataggcactgtccccagtacttgggagacagatatggggtgggggtaccggaagccctgcccccagccccctttctgcctttgaccctcatggtggctttgagcaggcatctcagttggatacagatcaggtcag

SEQ ID NO: 1167 - DNA, 150 bp, Artificial Sequence
  Synthetic polynucleotide
ctaatacgactcactataggcactgttaatagataatatatattatatgatagatatataatatattatataatatataatatattatatatctatcatataatatatataatatataatatattatcagttggatacagatcaggtcag

SEQ ID NO: 1168 - DNA, 150 bp, Artificial Sequence
  Synthetic polynucleotide
ctaatacgactcactataggcactgttccggaccccccagtgatgggagtggggggtgggtggtgaggggcgagcgcggctttcctgccccctccagcgcagaccgaggcgggggcgtctggccgctcagttggatacagatcaggtcag

SEQ ID NO: 1169 - DNA, 150 bp, Artificial Sequence
  Synthetic polynucleotide
ctaatacgactcactataggcactgtgccgccctggcggggcagggcgatagggagactcaggccgtcccaccgattggcgcgtgagctgaggcaagaccggagactggtctcccgggctgaactttcagttggatacagatcaggtcag

SEQ ID NO: 1170 - DNA, 150 bp, Artificial Sequence
  Synthetic polynucleotide
ctaatacgactcactataggcactgtgacaaacgacctttcctcgtttggaatgggtggcctgggcaccgggacaggatgtacattttacagttaatgtaataccatccactcattcaggagtcggtcagttggatacagatcaggtcag

SEQ ID NO: 1171 - DNA, 150 bp, Artificial Sequence
  Synthetic polynucleotide
ctaatacgactcactataggcactgtctcgtgctcgcagatgccgcccagcggctccggggcggcaggtggggcgggaggctgcgcggggcccgcgccccggggaaagccgaaggcggcgctgctgtcagttggatacagatcaggtcag

SEQ ID NO: 1172 - DNA, 150 bp, Artificial Sequence
  Synthetic polynucleotide
ctaatacgactcactataggcactgtagctctaggcttcacctcgctggggcccagcggccccgccttcgtgcagcccctgctctcaggtgaggggcggcctggcaggcagtgctggggacccaggtcagttggatacagatcaggtcag

SEQ ID NO: 1173 - DNA, 150 bp, Artificial Sequence
  Synthetic polynucleotide
ctaatacgactcactataggcactgtccctgctggggcagctgcagggaaggttgcggtgggcccaccgaggggcatctgacctgacctgggagacaggcccaggaaggtctgagagggggtgatgtcagttggatacagatcaggtcag

SEQ ID NO: 1174 - DNA, 150 bp, Artificial Sequence
  Synthetic polynucleotide
ctaatacgactcactataggcactgtttaatggatgggctctcccacccccacccctcccagcccctgcccccagggccacctggggaggctgggcaggtacttacagcagggccagggggtcctgtcagttggatacagatcaggtcag

SEQ ID NO: 1175 - DNA, 150 bp, Artificial Sequence
  Synthetic polynucleotide
ctaatacgactcactataggcactgtccctggcatttctcttctctatgacagggacaccctgctttaaaggaagcagggtcagcgtcagctcgctgcctactccctcgccgccagagggaggtggtcagttggatacagatcaggtcag

SEQ ID NO: 1176 - DNA, 150 bp, Artificial Sequence
  Synthetic polynucleotide
ctaatacgactcactataggcactgtttcctctgtccctctgcagctgggctgagtcagcccctccctgcccccagctgggcagggggcactgttgaaagggaggggatcaaggaggatggaggtttcagttggatacagatcaggtcag

SEQ ID NO: 1177 - DNA, 150 bp, Artificial Sequence
  Synthetic polynucleotide
ctaatacgactcactataggcactgttcatactgaagggcctccaaggggagggggcccacctggtgaggggtggacaggactctgagccttggatcgctgggccattctagggccagctcgagcctcagttggatacagatcaggtcag

SEQ ID NO: 1178 - DNA, 150 bp, Artificial Sequence
  Synthetic polynucleotide
ctaatacgactcactataggcactgtctacattcagagctgtcctaggccatgtggcccatgggctgcaggttggacaagcttgccttagaaggaaagagattggtcaggcacggtggctcacgcctcagttggatacagatcaggtcag

SEQ ID NO: 1179 - DNA, 150 bp, Artificial Sequence
  Synthetic polynucleotide
ctaatacgactcactataggcactgtgacggagccgccgccctcggggaccccgggcccggacgacgcccgcgacgacgaccacgagggaggccccgtggaaggcccggggcccctgcccagcccctcagttggatacagatcaggtcag

SEQ ID NO: 1180 - DNA, 150 bp, Artificial Sequence
  Synthetic polynucleotide
ctaatacgactcactataggcactgtcagccaacaggcgaagaaagccaggatgaggatgactgtggtcttgagggccttgcgcttctggtggcccttggagtgtgacagcttggagatgataatgtcagttggatacagatcaggtcag

SEQ ID NO: 1181 - DNA, 150 bp, Artificial Sequence
  Synthetic polynucleotide
ctaatacgactcactataggcactgtatatatacatatatatgtatatatacatatatatgtatatatacatatatatgtatatatacatatagatatgtatacatatacacacatatatacatactcagttggatacagatcaggtcag

SEQ ID NO: 1182 - DNA, 150 bp, Artificial Sequence
  Synthetic polynucleotide
ctaatacgactcactataggcactgtagctggagctgctgtcgggggaggccaaggctgtgtcgggcagctgccttctctacagcccgaagcacatccccatagtcagggaaggtatcaggccctgtcagttggatacagatcaggtcag

SEQ ID NO: 1183 - DNA, 150 bp, Artificial Sequence
  Synthetic polynucleotide
ctaatacgactcactataggcactgttgcctcatcaagtgggtccctgacccccgagtagcctaactgggagacacctcccagtaggggcctacagacacctcatacagctgggtgcccctctgagtcagttggatacagatcaggtcag

SEQ ID NO: 1184 - DNA, 150 bp, Artificial Sequence
  Synthetic polynucleotide
ctaatacgactcactataggcactgtaggtgctgtacacaggagcagagcgcgacgtgcgggcggagtgcggtctgctccttagccctgtcagtggggacgtgcatgcttgtccctttggcgggagtcagttggatacagatcaggtcag

SEQ ID NO: 1185 - DNA, 150 bp, Artificial Sequence
  Synthetic polynucleotide
ctaatacgactcactataggcactgtccacatcaggagggtgctggaatgggcagcagccctgtgaggttgcgacctgtgcagcaagggcacctgaccacagttgcagccctacagagcagggagatcagttggatacagatcaggtcag

SEQ ID NO: 1186 - DNA, 150 bp, Artificial Sequence
  Synthetic polynucleotide
ctaatacgactcactataggcactgtgatgagagcttctcagggctgcgatcctggcgggccagtcaagcgggcaggagcagccccagccagggtgaccctgcctgctgggtgatacgccctggcatcagttggatacagatcaggtcag

SEQ ID NO: 1187 - DNA, 150 bp, Artificial Sequence
  Synthetic polynucleotide
ctaatacgactcactataggcactgtaaaaatacccacacccatatatatatctaaataatatattatttagatatctaaataatatattatttagatatctaaataatatattatttagatatattcagttggatacagatcaggtcag

SEQ ID NO: 1188 - DNA, 150 bp, Artificial Sequence
  Synthetic polynucleotide
ctaatacgactcactataggcactgtctactcaggaggctgaagtgggagaatcacttgagcctggaagatcaaggctgcagtgagccacgatggtgccactgcactccagcctgggtgacagagctcagttggatacagatcaggtcag

SEQ ID NO: 1189 - DNA, 150 bp, Artificial Sequence
  Synthetic polynucleotide
ctaatacgactcactataggcactgtatgcgaccctccgggacggccggggcagcgctcctggcgctgctggctgcgctctgcccggcgagtcgggctctggaggaaaagaaaggtaagggcgtgttcagttggatacagatcaggtcag

SEQ ID NO: 1190 - DNA, 150 bp, Artificial Sequence
  Synthetic polynucleotide
ctaatacgactcactataggcactgtaggctgggcgcaatggctcatgcctgtaatcccagccctttgggaggctgaggtgggcggatgacttgaggtcaggagttcgagcccagcctagccaacatcagttggatacagatcaggtcag

SEQ ID NO: 1191 - DNA, 150 bp, Artificial Sequence
  Synthetic polynucleotide
ctaatacgactcactataggcactgtcaaagttaagtaactttccacaggttactcagctgaccctactgcctgggccaggaagcagacccaggcagtctgaggcagagtgctcaaatccagccattcagttggatacagatcaggtcag

SEQ ID NO: 1192 - DNA, 150 bp, Artificial Sequence
  Synthetic polynucleotide
ctaatacgactcactataggcactgtacctgagcggggtgagtcatccccactggccacaggggcctctccatagcccttagggaacccagggctgctgagaggggtggggatgtggcccttccaatcagttggatacagatcaggtcag

SEQ ID NO: 1193 - DNA, 150 bp, Artificial Sequence
  Synthetic polynucleotide
ctaatacgactcactataggcactgtacagctgtgtctataaagcagctgaagggctgaggccgggggaggtcctggcagcagggcgttattttgggcctggcctgccacccccagctcctgtttctcagttggatacagatcaggtcag

SEQ ID NO: 1194 - DNA, 150 bp, Artificial Sequence
  Synthetic polynucleotide
ctaatacgactcactataggcactgttttgccaggaccacctgggagaggggcggtcaggctcgggttatcggcgtggtccggccgagggcggcattccgggaccctcacgccacccttctccagatcagttggatacagatcaggtcag

SEQ ID NO: 1195 - DNA, 150 bp, Artificial Sequence
  Synthetic polynucleotide
ctaatacgactcactataggcactgtggggctcccacagtgcagcggtgggctgaagggctcctcaggtgccgccaaagtgggagcccaggcagaggaggcgctgagagcgagcgagggctgtaagtcagttggatacagatcaggtcag

SEQ ID NO: 1196 - DNA, 150 bp, Artificial Sequence
  Synthetic polynucleotide
ctaatacgactcactataggcactgtatacacatgtacatatatacatatgtgtatatatacatgtatacacatgtacatatatacatatatgtgtatatatgtatatatgtgtgtatacatgtattcagttggatacagatcaggtcag

SEQ ID NO: 1197 - DNA, 150 bp, Artificial Sequence
  Synthetic polynucleotide
ctaatacgactcactataggcactgtagggagggagggagggagggagaagggagagcctagggagctgcgggagccgcgggacgcgcgacccgagggtgcgcgcagggagcccggggcgcgcggctcagttggatacagatcaggtcag

SEQ ID NO: 1198 - DNA, 150 bp, Artificial Sequence
  Synthetic polynucleotide
ctaatacgactcactataggcactgtccggaggtgcccaagctgaacgtcaccgttcaggatcaggaggagcatcgctgccgggagggggccctgagcctcctgcaacacctgcggcctcactgggtcagttggatacagatcaggtcag

SEQ ID NO: 1199 - DNA, 150 bp, Artificial Sequence
  Synthetic polynucleotide
ctaatacgactcactataggcactgtaggtgcctgcgcccaggctgtgaggagggagggctgcagcccaggccttccgcaggattccctccagccagatgccgggagcaacagagccgtgagagggtcagttggatacagatcaggtcag

SEQ ID NO: 1200 - DNA, 150 bp, Artificial Sequence
  Synthetic polynucleotide
ctaatacgactcactataggcactgtcagcgtcctccaggtggcggcggcggacgcggacgagggcaccaacgcggacatccgctatcgcctgcaggacgaggggacccccttccaaatggacccttcagttggatacagatcaggtcag

SEQ ID NO: 1201 - DNA, 150 bp, Artificial Sequence
  Synthetic polynucleotide
ctaatacgactcactataggcactgtgagggccttttgaagccatgcatggcccacgctggcctcatgggaacacaggtgctccagcacccgatgtgttcacgactaggtagggggaaccttcagctcagttggatacagatcaggtcag

SEQ ID NO: 1202 - DNA, 150 bp, Artificial Sequence
  Synthetic polynucleotide
ctaatacgactcactataggcactgtgaaaactaacttttgacaggcatggtggctcacacctgtaatcccagcattttgggagaccaaggctggtggatcacttgaggtggagaccagcctggcctcagttggatacagatcaggtcag

SEQ ID NO: 1203 - DNA, 150 bp, Artificial Sequence
  Synthetic polynucleotide
ctaatacgactcactataggcactgtccctgaaagcagcacaggggaggttggagtggccccaggcagggccatgagggcacaggtgggaagggactggggggtgggttctcagcccaccccactctcagttggatacagatcaggtcag

SEQ ID NO: 1204 - DNA, 150 bp, Artificial Sequence
  Synthetic polynucleotide
ctaatacgactcactataggcactgttcctcatcctggcgggcggttggaggtagtggggggtccccatcctgcaactcagccctggccaggagggcagtcctgggttcctgtttacggggcgtaatcagttggatacagatcaggtcag

SEQ ID NO: 1205 - DNA, 150 bp, Artificial Sequence
  Synthetic polynucleotide
ctaatacgactcactataggcactgtcctcgacgcggccacagaccgcgcattgatggcggctcggcggctcgcggggaggtgtgagcgaccgcgggcgcggcgggccggggagggcgcctggaggtcagttggatacagatcaggtcag

SEQ ID NO: 1206 - DNA, 150 bp, Artificial Sequence
  Synthetic polynucleotide
ctaatacgactcactataggcactgttgccccagacccggcgcagcgcctcggcgaggccgtctgcgaagtccgggccgccactcgggaccgcggcccgagccagaggagagacttcggagaagagtcagttggatacagatcaggtcag

SEQ ID NO: 1207 - DNA, 150 bp, Artificial Sequence
  Synthetic polynucleotide
ctaatacgactcactataggcactgtgggcgggcagcggtggcaccgagaaggcgcccccggcccgcctgcctgccttgcctggcgcccaccgctccccggcctcccccggcacgggctccagcggtcagttggatacagatcaggtcag

SEQ ID NO: 1208 - DNA, 150 bp, Artificial Sequence
  Synthetic polynucleotide
ctaatacgactcactataggcactgtacagcggccgcgccagggctaccggggcccgcggctgcagccgcagctgctgcagccgctgcggctgccgccatctggcaggaggcatagggcatgggtgtcagttggatacagatcaggtcag

SEQ ID NO: 1209 - DNA, 150 bp, Artificial Sequence
  Synthetic polynucleotide
ctaatacgactcactataggcactgtaagccgggaggcagaggttgcagtgggacgagatcgcaccactgcactccagtctgggcgacagagggagactccgtctcaaacaaaacaaaacaaaacttcagttggatacagatcaggtcag

SEQ ID NO: 1210 - DNA, 150 bp, Artificial Sequence
  Synthetic polynucleotide
ctaatacgactcactataggcactgttcccctctgggcctgagggcttggatgcagcagcttcctccactgccccgagcacagccaccgctgcagctgcggcactggcctactacagggacgctgatcagttggatacagatcaggtcag

SEQ ID NO: 1211 - DNA, 150 bp, Artificial Sequence
  Synthetic polynucleotide
ctaatacgactcactataggcactgtgtgagggaggccactgagctcccgctgcctcccccgctcccacccccagcccctgggtacacagagagtgggcctccagggcctccagcagctgaggggttcagttggatacagatcaggtcag

SEQ ID NO: 1212 - DNA, 150 bp, Artificial Sequence
  Synthetic polynucleotide
ctaatacgactcactataggcactgtcccctctctgggggaccaacttgagttaagcctcctgttcctgcaaggaaggggagtcctggctttctctgggcacccagagaactgggcgctagagacctcagttggatacagatcaggtcag

SEQ ID NO: 1213 - DNA, 150 bp, Artificial Sequence
  Synthetic polynucleotide
ctaatacgactcactataggcactgtctgggcaggggagtggcggggggcgctgcacctgctccagccgcacgtggcccctgcccagcagcctgtcctgtgggctcagagagccctggtggggggatcagttggatacagatcaggtcag

SEQ ID NO: 1214 - DNA, 150 bp, Artificial Sequence
  Synthetic polynucleotide
ctaatacgactcactataggcactgtgtgtgtaacgcgcccgcgcgcccgcgcgggtgaaggcagtggccgggggcgcgcccgggagggtaggggcgaaccgcgggcgccggggggcgggggcgcctcagttggatacagatcaggtcag

SEQ ID NO: 1215 - DNA, 150 bp, Artificial Sequence
  Synthetic polynucleotide
ctaatacgactcactataggcactgtagcaggtctaccgggccacgcaccgcctgctgctgctgggtaagggcgggcggggggcgccggccccggcccgggggccctcgaagggcgccccgcaggctcagttggatacagatcaggtcag

SEQ ID NO: 1216 - DNA, 150 bp, Artificial Sequence
  Synthetic polynucleotide
ctaatacgactcactataggcactgtccgggagcgggggcggctgctcgctctactcctgggaggggcctttcgaaggaccaggtgctgggcagaagccccctccctccctcagcaatgaggagcctcagttggatacagatcaggtcag

SEQ ID NO: 1217 - DNA, 150 bp, Artificial Sequence
  Synthetic polynucleotide
ctaatacgactcactataggcactgtgagtgggccgggcgccgtgactcacatctgtaatcccaacactttgggaggctgaggtgggtagatcacctgaggtcaggagttccagaccagcgtggcctcagttggatacagatcaggtcag

SEQ ID NO: 1218 - DNA, 150 bp, Artificial Sequence
  Synthetic polynucleotide
ctaatacgactcactataggcactgtagacccaccaggtacgcttcgctagcctcctgttgaggacgagagccgcactattaatcccactcggggagcggaaaccgcccagccctcccccggctcctcagttggatacagatcaggtcag

SEQ ID NO: 1219 - DNA, 150 bp, Artificial Sequence
  Synthetic polynucleotide
ctaatacgactcactataggcactgtatggagggcgccggcggcgcgaacgacaagaaaaagtaagcccattccctcggcccgccgccttctcccccggcgaccccgcccgcctgcccgccctgggtcagttggatacagatcaggtcag

SEQ ID NO: 1220 - DNA, 150 bp, Artificial Sequence
  Synthetic polynucleotide
ctaatacgactcactataggcactgtagccctaccaagtaggcctcacaagcctcctgcagcgccatcaccgcagagctctggaagcgaagatcggtcttgaagtcttgggcgatttctcgcaccatcagttggatacagatcaggtcag

SEQ ID NO: 1221 - DNA, 150 bp, Artificial Sequence
  Synthetic polynucleotide
ctaatacgactcactataggcactgtggccctacctcctggctggagaaggccccctggacaagggggagtcctgcggcggcggtcgaggggagctggctgagctgcccaatgggctgggggagactcagttggatacagatcaggtcag

SEQ ID NO: 1222 - DNA, 150 bp, Artificial Sequence
  Synthetic polynucleotide
ctaatacgactcactataggcactgtcgactcagctacggcccgtgtccccagtagccccactaagactcagaaccaacaggtgcccgtgggacactctggggacaagaggggccgggccccagggtcagttggatacagatcaggtcag

SEQ ID NO: 1223 - DNA, 150 bp, Artificial Sequence
  Synthetic polynucleotide
ctaatacgactcactataggcactgtaaaacactgagcagccaagggaacacatctgggctgctttggagagcactctctggtgagaaatcaatgtaaacaccatcttaccaatgggattggtggatcagttggatacagatcaggtcag

SEQ ID NO: 1224 - DNA, 150 bp, Artificial Sequence
  Synthetic polynucleotide
ctaatacgactcactataggcactgttgcccgcccctgggctggtgggtcaggctcgtccttccagccctcagcccagtgggctttaggcccctggggtagaggggcattgtgaggccccatgccctcagttggatacagatcaggtcag

SEQ ID NO: 1225 - DNA, 150 bp, Artificial Sequence
  Synthetic polynucleotide
ctaatacgactcactataggcactgtacccaggctagagtgcagtgtggcacagtcttggctcactgcaatctctgcctcccaagttcaagggattctcccgtctcagcctcccgagtagctgggatcagttggatacagatcaggtcag

SEQ ID NO: 1226 - DNA, 150 bp, Artificial Sequence
  Synthetic polynucleotide
ctaatacgactcactataggcactgttgcttgcccgagagggcgggcagatcagcaggggggccatggagtgggacacttgccttgttacagagggacagggagaacaggtggttcccctgagatatcagttggatacagatcaggtcag

SEQ ID NO: 1227 - DNA, 150 bp, Artificial Sequence
  Synthetic polynucleotide
ctaatacgactcactataggcactgtctgtaatcccagctgcttgggaggctgaggcatgagaatcacctgaacccaggaagtggaggttgcagtgagatcacgccactgcactccagcttgggagtcagttggatacagatcaggtcag

SEQ ID NO: 1228 - DNA, 150 bp, Artificial Sequence
  Synthetic polynucleotide
ctaatacgactcactataggcactgtaatgtccaaagtaattttaccttgtcaggagatcaaactggattcattttgtttgactttttaagaaatcctgaaagcataactttcaggataaggtaattcagttggatacagatcaggtcag

SEQ ID NO: 1229 - DNA, 150 bp, Artificial Sequence
  Synthetic polynucleotide
ctaatacgactcactataggcactgtaaaataattatgcatactaattaatgaattgtaatttattaattatgtatttttgaaaatatggtcagaccatattttcaaaaatcagaataattttagatcagttggatacagatcaggtcag

SEQ ID NO: 1230 - DNA, 150 bp, Artificial Sequence
  Synthetic polynucleotide
ctaatacgactcactataggcactgtgctggcccaggcggtgcaggagctggagcggggcccgagtggggcgccagagccccagcgcgagcaggagaggggccggagcgcggatccgcgccgcgcttcagttggatacagatcaggtcag

SEQ ID NO: 1231 - DNA, 150 bp, Artificial Sequence
  Synthetic polynucleotide
ctaatacgactcactataggcactgtgccgccgtcaccagccacgcggagcagccccagcccgtcgtggccaccaagggccccagggaggcccacgtggaaggtctcggcggccccggctggatcctcagttggatacagatcaggtcag

SEQ ID NO: 1232 - DNA, 150 bp, Artificial Sequence
  Synthetic polynucleotide
ctaatacgactcactataggcactgtgcccaggcaggcatcactgagagcagagagcaggctgtgggcgcacctgtgtgggtgcgctggggctgagaagcagccttggacctgggtctgctttgtatcagttggatacagatcaggtcag

SEQ ID NO: 1233 - DNA, 150 bp, Artificial Sequence
  Synthetic polynucleotide
ctaatacgactcactataggcactgtgcagtagccgctctcccgggaggaccgagcgcggcttgtctctggcggcggcggggcgggcacctcggtttggcgctcttcgcgccgcctccgctggggctcagttggatacagatcaggtcag

SEQ ID NO: 1234 - DNA, 150 bp, Artificial Sequence
  Synthetic polynucleotide
ctaatacgactcactataggcactgtgcatcccctgccatgtggcaacctggccaagttctggacatgagagagctccctgcccctccctgcagcccaggcacactcgggctggcaggctggaccctcagttggatacagatcaggtcag

SEQ ID NO: 1235 - DNA, 150 bp, Artificial Sequence
  Synthetic polynucleotide
ctaatacgactcactataggcactgtaggttgcagtgacccaagatgcactccagcctgggcaacagagcaagagagacagggtcttactctattgcccaggctagtctcctggactcaagcaatctcagttggatacagatcaggtcag

SEQ ID NO: 1236 - DNA, 150 bp, Artificial Sequence
  Synthetic polynucleotide
ctaatacgactcactataggcactgtggaagggcccaaaccacaggtgaatccacccaggttgaacgcccacacagaggtgtgtgggtggggtggggtggggtggggtggtgcagcctgactgccttcagttggatacagatcaggtcag

SEQ ID NO: 1237 - DNA, 150 bp, Artificial Sequence
  Synthetic polynucleotide
ctaatacgactcactataggcactgttcctgctggggagctgccgccccagggggaagtcgtgtgcagccggccggtggccattgctgagagggggtccagcgcccaagtgggtgcacgaagagactcagttggatacagatcaggtcag

SEQ ID NO: 1238 - DNA, 150 bp, Artificial Sequence
  Synthetic polynucleotide
ctaatacgactcactataggcactgtaggcacgagaatcacttgaacccagaaggcagaggttgcagtgagctgagatcacatcactgcattccagcctcagtgacagagtgaggctgtctcaaaatcagttggatacagatcaggtcag

SEQ ID NO: 1239 - DNA, 150 bp, Artificial Sequence
  Synthetic polynucleotide
ctaatacgactcactataggcactgtgccacccccctccgggtctggagagcccaggaggggctctgagccaggaaaactggcactggcatcaccctggctcagattagagatctcgttaacgatgtcagttggatacagatcaggtcag

SEQ ID NO: 1240 - DNA, 150 bp, Artificial Sequence
  Synthetic polynucleotide
ctaatacgactcactataggcactgtcggggtgcggtggctcaagcctgtaatcccagcactttgggaggccaagacgggtggatcacttgaggtgaggagtttcagaccagcctggccaacatggtcagttggatacagatcaggtcag

SEQ ID NO: 1241 - DNA, 150 bp, Artificial Sequence
  Synthetic polynucleotide
ctaatacgactcactataggcactgtatacaaatcgttggagaccccactctctaacgggaacacctggagcattccagctccaaaccattttccaaacaccaaactttccctttgtggatggagctcagttggatacagatcaggtcag

SEQ ID NO: 1242 - DNA, 150 bp, Artificial Sequence
  Synthetic polynucleotide
ctaatacgactcactataggcactgtaccctaaatgcacgctgcacgaggactacgggcggctgtgggagagccgccagttctgcgacgtggagttcgtgctgggtgaggtgggtgcctgtcctcgtcagttggatacagatcaggtcag

SEQ ID NO: 1243 - DNA, 150 bp, Artificial Sequence
  Synthetic polynucleotide
ctaatacgactcactataggcactgttatatatgtgtgtatatatatgtgtgtatatatatgtgtatatatacacatacatacatacacacacatacatacatatatatacacacatacatatatatcagttggatacagatcaggtcag

SEQ ID NO: 1244 - DNA, 150 bp, Artificial Sequence
  Synthetic polynucleotide
ctaatacgactcactataggcactgtataaaaccccaggcccggggcaacatcgccggagcgcacgccaagggcccggggcaactccggcaccaggagtgcggtgccgttccacggcgtcccgagctcagttggatacagatcaggtcag

SEQ ID NO: 1245 - DNA, 150 bp, Artificial Sequence
  Synthetic polynucleotide
ctaatacgactcactataggcactgttccggcccgcataggccccggccgcggcctctgcctgcgcttggcccctgggccctaccgggctctcagcaggcccgcagggcccacctggtccgggacctcagttggatacagatcaggtcag

SEQ ID NO: 1246 - DNA, 150 bp, Artificial Sequence
  Synthetic polynucleotide
ctaatacgactcactataggcactgttgtcctcacgaggtggaagggtgaacaagctcccttgggcctatttgataagggcacttttctcattcatgagggctctgccctcatgacctaattactttcagttggatacagatcaggtcag

SEQ ID NO: 1247 - DNA, 150 bp, Artificial Sequence
  Synthetic polynucleotide
ctaatacgactcactataggcactgtttagctggcctccatccggagcttcttcctgctttggggctcttcaggctcagactccgagctggagtccgagcccccatcgaaggcagagatggtgctgtcagttggatacagatcaggtcag

SEQ ID NO: 1248 - DNA, 150 bp, Artificial Sequence
  Synthetic polynucleotide
ctaatacgactcactataggcactgtccagtcccagccccaggtagctgctggactacagccccaggctcagggacagctgcccaggttgggcacgcagccagtgaactgggttggggacagtatgtcagttggatacagatcaggtcag

SEQ ID NO: 1249 - DNA, 150 bp, Artificial Sequence
  Synthetic polynucleotide
ctaatacgactcactataggcactgttcctgccatccctaatcccgtacatgcagcccccatggcctgtggaagggagccctgtccaggtgggaggctggacacaggctggagctccagcctttcatcagttggatacagatcaggtcag

SEQ ID NO: 1250 - DNA, 150 bp, Artificial Sequence
  Synthetic polynucleotide
ctaatacgactcactataggcactgtcctccttgagctctggtgggctccacccagttctagcttccaggctgctttgtttacctaagcaagcctgggcaatggcgggtgcccctcccccagcctctcagttggatacagatcaggtcag

SEQ ID NO: 1251 - DNA, 150 bp, Artificial Sequence
  Synthetic polynucleotide
ctaatacgactcactataggcactgttgcttgaacccgggaggcggaggttgcagtgagctgagatctcgccactgcacttcagcctgggtgacagagcaagactctgtctcaaaggaggttgcagtcagttggatacagatcaggtcag

SEQ ID NO: 1252 - DNA, 150 bp, Artificial Sequence
  Synthetic polynucleotide
ctaatacgactcactataggcactgtgatcacctatgcccaggaagagggagccctgggaggtgatgcagggccccgggaggggaggtagagtaagaggctctcctgctggtcccctccccttccatcagttggatacagatcaggtcag

SEQ ID NO: 1253 - DNA, 150 bp, Artificial Sequence
  Synthetic polynucleotide
ctaatacgactcactataggcactgtgcaagccaccgcgcccagccctagtgtagcaatcttaatcagaaatatgtctctggctgggcgaggtggctcatgcctataatcccagcactttgggaggtcagttggatacagatcaggtcag

SEQ ID NO: 1254 - DNA, 150 bp, Artificial Sequence
  Synthetic polynucleotide
ctaatacgactcactataggcactgtcaaggcgaagaacctcaacggagggctgcggagatcggtagcgcctgctgcccccaccaggtagcggggtgggggtggggtcgaaggcgggggcatagcgtcagttggatacagatcaggtcag

SEQ ID NO: 1255 - DNA, 150 bp, Artificial Sequence
  Synthetic polynucleotide
ctaatacgactcactataggcactgtgcaggggcggccgggcagaggcgcccctcacctcccggacggggtggctggccgggcggggggctgacccccacacctccctcccggacggggcggctggtcagttggatacagatcaggtcag

SEQ ID NO: 1256 - DNA, 150 bp, Artificial Sequence
  Synthetic polynucleotide
ctaatacgactcactataggcactgtccctggctgctctcaacatgcgagtgcggcgccgcctgtctctgttcttgaacgtgcggacacaggtggcggccgactggaccgcgctggcggaggagattcagttggatacagatcaggtcag

SEQ ID NO: 1257 - DNA, 150 bp, Artificial Sequence
  Synthetic polynucleotide
ctaatacgactcactataggcactgtggacgccgcgccccctggcgccgcagccgccttctatgcgccgggcccgctgcccccgggccgcggcggcgagcactacagcggcgactccgacgcgtcctcagttggatacagatcaggtcag

SEQ ID NO: 1258 - DNA, 150 bp, Artificial Sequence
  Synthetic polynucleotide
ctaatacgactcactataggcactgtatgcacgtgaaggtgaacccctggtcctgccagcctgccgtgtggcccgcaccacagggctggttgcaggcctacccctaaacccccagccgggcacttttcagttggatacagatcaggtcag

SEQ ID NO: 1259 - DNA, 150 bp, Artificial Sequence
  Synthetic polynucleotide
ctaatacgactcactataggcactgtggaggtgggggagtcagccccccgcccggccagccgccccgtctgggaggtgaggggcgcctctgcccggctgcccctactgggaagtgaggagcccctctcagttggatacagatcaggtcag

SEQ ID NO: 1260 - DNA, 150 bp, Artificial Sequence
  Synthetic polynucleotide
ctaatacgactcactataggcactgtcctcagcctcccaaagtgctgggattacagatgcaagccactgcacctggccttaagtctgcttttaaaaaatgttttggctgggtgcggtggctcatgctcagttggatacagatcaggtcag

SEQ ID NO: 1261 - DNA, 150 bp, Artificial Sequence
  Synthetic polynucleotide
ctaatacgactcactataggcactgttgttgggcacacctcccagacggggtggtggccgggcagaggggctccttacttcccagtaggggcggccgggcagaggcgcccctcacctcccggatggtcagttggatacagatcaggtcag

SEQ ID NO: 1262 - DNA, 150 bp, Artificial Sequence
  Synthetic polynucleotide
ctaatacgactcactataggcactgttttttgccggcaccgaggcgggggagccgcgcagccccggaagggccgggccgcgccggctcagacggccagcgtccgccccctcttgccccgccgcccatcagttggatacagatcaggtcag

SEQ ID NO: 1263 - DNA, 150 bp, Artificial Sequence
  Synthetic polynucleotide
ctaatacgactcactataggcactgttagcagaggaggaagtaagctggggcagccagccgcctgtctgtctgctggggcaagagtgccccagcctggctcaccccatcctcctgaggaccagtcctcagttggatacagatcaggtcag

SEQ ID NO: 1264 - DNA, 150 bp, Artificial Sequence
  Synthetic polynucleotide
ctaatacgactcactataggcactgtgaacctgcttgctccagggccgcctggagcctggggactcgcagcaggggtgactgcaaaggcagcccctgccagggacactccctggagacccaggcattcagttggatacagatcaggtcag

SEQ ID NO: 1265 - DNA, 150 bp, Artificial Sequence
  Synthetic polynucleotide
ctaatacgactcactataggcactgtgtcccgggccgcggggagcagaggcggcggggaaccccggcggttggcggggcaccacgggaggggcccccggcgatgtccaaactcttgggaacccagctcagttggatacagatcaggtcag

SEQ ID NO: 1266 - DNA, 150 bp, Artificial Sequence
  Synthetic polynucleotide
ctaatacgactcactataggcactgttcaggaggtggagacaggagaattgcttgaacctgggaggtggagtgcagtgagattgcaccactgcactccagcttgggcaaaagagcgagactccgcctcagttggatacagatcaggtcag

SEQ ID NO: 1267 - DNA, 150 bp, Artificial Sequence
  Synthetic polynucleotide
ctaatacgactcactataggcactgtactaaaaatgcctaacaacaggctgggcgtggtggctcacacctgtaatcccagcactctgggaggcccaggtgggaggattgcttgaggccaggagttctcagttggatacagatcaggtcag

SEQ ID NO: 1268 - DNA, 150 bp, Artificial Sequence
  Synthetic polynucleotide
ctaatacgactcactataggcactgtaggggcgcctctgcccggccgcccctactgggaagtgaggagcccctctgcccggccagccgccccgtccgggagggaggtgggggtgtcagccccccgctcagttggatacagatcaggtcag

SEQ ID NO: 1269 - DNA, 150 bp, Artificial Sequence
  Synthetic polynucleotide
ctaatacgactcactataggcactgtaagattcctccaacgggctgccctgctaagggcaaagcccgaggcccacaaaggtgtggagagcaatgagaatggtgtgcccagcattctgcatggaggctcagttggatacagatcaggtcag

SEQ ID NO: 1270 - DNA, 150 bp, Artificial Sequence
  Synthetic polynucleotide
ctaatacgactcactataggcactgtcgccgcgggccgcgcggcaatcagcgggccgagccacgcgccagcgctgggacctgcagggcgcgccgccgcctccacgctgcgccccgggccccgccgctcagttggatacagatcaggtcag

SEQ ID NO: 1271 - DNA, 150 bp, Artificial Sequence
  Synthetic polynucleotide
ctaatacgactcactataggcactgtgtgaccaacaaaggtaacagtattaccttgtttctgttggtaagggaaatgctgttaccttttctccattaaaaatggagatacccttggtgggcactgttcagttggatacagatcaggtcag

SEQ ID NO: 1272 - DNA, 150 bp, Artificial Sequence
  Synthetic polynucleotide
ctaatacgactcactataggcactgtcagtgtctcgaggctgcacagggcagtggaccctggggctggcccatgagaccattcttccctcctaggcctctgggcctgtgatgggaggggctgccattcagttggatacagatcaggtcag

SEQ ID NO: 1273 - DNA, 150 bp, Artificial Sequence
  Synthetic polynucleotide
ctaatacgactcactataggcactgttagacggagtctcgctctgttgcccaggctggagtgcagtggcacgatcttggctcactgcagcccccacctcctgggttcaagcagttatgcttcagcctcagttggatacagatcaggtcag

SEQ ID NO: 1274 - DNA, 150 bp, Artificial Sequence
  Synthetic polynucleotide
ctaatacgactcactataggcactgtgaggtgatggggccggggccgggagcccagccttgtccagggcccccagccgcagccaggcctccagctgccgccgctgccgctgccgccgccgccgctgtcagttggatacagatcaggtcag

SEQ ID NO: 1275 - DNA, 150 bp, Artificial Sequence
  Synthetic polynucleotide
ctaatacgactcactataggcactgtagtaaaaggctgggcgtggtggctcacgcctataatcccaacactttgggaagccaaggcagatggatcatttgagcccaggagtttgagaccaccctggtcagttggatacagatcaggtcag

SEQ ID NO: 1276 - DNA, 150 bp, Artificial Sequence
  Synthetic polynucleotide
ctaatacgactcactataggcactgtcatgtagatacatgtagatacatgtatacatatatacatgtagatacatgtagatacatgtatacatatatacatgtagatacatgtagatacatgtatatcagttggatacagatcaggtcag

SEQ ID NO: 1277 - DNA, 150 bp, Artificial Sequence
  Synthetic polynucleotide
ctaatacgactcactataggcactgtgccccagcgacttgggcaaactttcgggccctcccagactccctccgggccccgcccccgcttcgtctcgggtggtcactgggggcggggggcatccgggtcagttggatacagatcaggtcag

SEQ ID NO: 1278 - DNA, 150 bp, Artificial Sequence
  Synthetic polynucleotide
ctaatacgactcactataggcactgtaccgtggcgctgccgcgcctcgtggccccggcccgccgtctcctggaacagggcatccgtgtggcaggcctgggcacgcccagcttcgcgccctacgaggtcagttggatacagatcaggtcag

SEQ ID NO: 1279 - DNA, 150 bp, Artificial Sequence
  Synthetic polynucleotide
ctaatacgactcactataggcactgttgttgcccaggctggagtgcagcagtgtgatcacagctcactgcagcctccaactcctgggctcaagtggtcctccagcctcagcctcctgagtagctggtcagttggatacagatcaggtcag

SEQ ID NO: 1280 - DNA, 150 bp, Artificial Sequence
  Synthetic polynucleotide
ctaatacgactcactataggcactgttgggaggctgaggcagagaactgcttgaacccgggaggcggaggttgcagtgagctgagatcgtgccactgcactccagcctgggcaacagagcaagacttcagttggatacagatcaggtcag

SEQ ID NO: 1281 - DNA, 150 bp, Artificial Sequence
  Synthetic polynucleotide
ctaatacgactcactataggcactgtggctgggagcacagtggtgcgatcccggctcactgcagcctccacctcctgggctgaactgattctcccacctcagcctcccaagcagctgaggtgggagtcagttggatacagatcaggtcag

SEQ ID NO: 1282 - DNA, 150 bp, Artificial Sequence
  Synthetic polynucleotide
ctaatacgactcactataggcactgtgcgctaggactggagcattttttgctccagtttcaccttcagcaagcgctatatggtaatcgtgtgctggcagccagcctgtctcagggcagcttctctttcagttggatacagatcaggtcag

SEQ ID NO: 1283 - DNA, 150 bp, Artificial Sequence
  Synthetic polynucleotide
ctaatacgactcactataggcactgtgtaatcccagcaccttgggagaccaaggtgggcagatgacctgaggtcaggagttcaagaccagcctcaccaacatggtgaaaccccgtctctactaaaatcagttggatacagatcaggtcag

SEQ ID NO: 1284 - DNA, 150 bp, Artificial Sequence
  Synthetic polynucleotide
ctaatacgactcactataggcactgtgctgccctcagatggagcccggaggttgctccagccggagcatcccagggaggtgcttgtcccggcgccccacagtgccttctcctttaccggggccgcctcagttggatacagatcaggtcag

SEQ ID NO: 1285 - DNA, 150 bp, Artificial Sequence
  Synthetic polynucleotide
ctaatacgactcactataggcactgtgtggctgcgggaaggacgcgcggcattgtctgtgcggggacccgggacgggtcggggcatcacaggcgcgggaatccacgtgtggactctgcgttcgcggtcagttggatacagatcaggtcag

SEQ ID NO: 1286 - DNA, 150 bp, Artificial Sequence
  Synthetic polynucleotide
ctaatacgactcactataggcactgtgggaaggggacccctacagggggtactctgcgggcccgcgggccccagccttggacaggccggggcaaggggcgctggggggtaggcagagaggatgaggtcagttggatacagatcaggtcag

SEQ ID NO: 1287 - DNA, 150 bp, Artificial Sequence
  Synthetic polynucleotide
ctaatacgactcactataggcactgtgggcatggcctaggaaaccattttcccctcctaggcctctgggcctatgatgggaggggctgtcctgaaggtctgtgacatgccctggagacattttccctcagttggatacagatcaggtcag

SEQ ID NO: 1288 - DNA, 150 bp, Artificial Sequence
  Synthetic polynucleotide
ctaatacgactcactataggcactgtcagaagggaggagtgagcgccggggagtcgcggcccgcgcgcccacgcccgcttgcgcgcacccgcccggtgagcccccaacagccgtgggggcgcgggttcagttggatacagatcaggtcag

SEQ ID NO: 1289 - DNA, 150 bp, Artificial Sequence
  Synthetic polynucleotide
ctaatacgactcactataggcactgttgttggccaggctagtctcgaacacctgacctcaagtgatctgcccgccttggcctcccagagtactgggattacaggtgtgagccactgcgcctggccttcagttggatacagatcaggtcag

SEQ ID NO: 1290 - DNA, 150 bp, Artificial Sequence
  Synthetic polynucleotide
ctaatacgactcactataggcactgtggggaccggagggcccgggggacagggaactgggaggctcccaggccgtcagaggggcccagggctgggccagtgaacaaggcacgtgaacaaggcagcgtcagttggatacagatcaggtcag

SEQ ID NO: 1291 - DNA, 150 bp, Artificial Sequence
  Synthetic polynucleotide
ctaatacgactcactataggcactgtatgacatcgcggaggtgaggagccccgaggggcccggcgcgggcctcggcccggccaccgccgcgttcggttagccccgtccggaagggggcgccccggctcagttggatacagatcaggtcag

SEQ ID NO: 1292 - DNA, 150 bp, Artificial Sequence
  Synthetic polynucleotide
ctaatacgactcactataggcactgtgggcatggtggcacatgcctgtggtcccagctccttgggaggctgaggtgggagcattgcttgaggccaggaggattgcttgggcctgggaggtcaaggctcagttggatacagatcaggtcag

SEQ ID NO: 1293 - DNA, 150 bp, Artificial Sequence
  Synthetic polynucleotide
ctaatacgactcactataggcactgtgcagtggagtgatcttggctcactgcaacctccgcttcccaggtagctgggattacaggcacctcagcctcccaagtagctgggattacaggtgcccacctcagttggatacagatcaggtcag

SEQ ID NO: 1294 - DNA, 150 bp, Artificial Sequence
  Synthetic polynucleotide
ctaatacgactcactataggcactgtatgcaggccatcaagtgtgtggtggtgggagacgggtgagtgcgcggccggggccgggctggaggccgcgggatcgggcgcggaggggggttgggcccggtcagttggatacagatcaggtcag

SEQ ID NO: 1295 - DNA, 150 bp, Artificial Sequence
  Synthetic polynucleotide
ctaatacgactcactataggcactgtgagtttcgcagatgctgagtttttaacaaaccaaaggtttgtggtaacagtgccttaagcaagtctgttggtgccattttccaacagcacaagcttactttcagttggatacagatcaggtcag

SEQ ID NO: 1296 - DNA, 150 bp, Artificial Sequence
  Synthetic polynucleotide
ctaatacgactcactataggcactgtcgccaaggcggctcggcggggatccgtcctcgccaggggccgggtcccggcgggaggaggcgccctccctgccccccgccacggcggagcgtctgcagaatcagttggatacagatcaggtcag

SEQ ID NO: 1297 - DNA, 150 bp, Artificial Sequence
  Synthetic polynucleotide
ctaatacgactcactataggcactgtggacccccatagggacagctggcctggggaggcggggaccgcctctttccacccccagcccccagggaggagccctggggcctgtttcccattcccaggatcagttggatacagatcaggtcag

SEQ ID NO: 1298 - DNA, 150 bp, Artificial Sequence
  Synthetic polynucleotide
ctaatacgactcactataggcactgtgtgttagccaggatggtctggatctcctgacctcatgatccgtccgcctcggcctcccaaagtgttgggattgcaggcgtgacccaccgcgcctggcctttcagttggatacagatcaggtcag

SEQ ID NO: 1299 - DNA, 150 bp, Artificial Sequence
  Synthetic polynucleotide
ctaatacgactcactataggcactgtccctgagtctggccactcaccccgggcctgcctgcagctggcctggtacctcctggtggccagctggctgatggcccaggctgttctctgctgaagcggatcagttggatacagatcaggtcag

SEQ ID NO: 1300 - DNA, 150 bp, Artificial Sequence
  Synthetic polynucleotide
ctaatacgactcactataggcactgtcctttgtgtgcgttctctgtcttatttccgggcgacgtgccgcgtgcgttgtcggacgtgaagggcagtccgggaaaaacgggtgcggccgcctcctgtgtcagttggatacagatcaggtcag

SEQ ID NO: 1301 - DNA, 150 bp, Artificial Sequence
  Synthetic polynucleotide
ctaatacgactcactataggcactgttgcgcagcgtatgcacacgaactgccaaaatatggtgtgaaggttggcctgacaaattatgctgcagcatattgtactggcctgctgctggcccgcagggtcagttggatacagatcaggtcag

SEQ ID NO: 1302 - DNA, 150 bp, Artificial Sequence
  Synthetic polynucleotide
ctaatacgactcactataggcactgtaaaagaaagcaggccccgccggcccgaggaggacccggccggcgcgccgcacccggagaggcccggccccgcgagccgctgcaggcaggcgcagtggccgtcagttggatacagatcaggtcag

SEQ ID NO: 1303 - DNA, 150 bp, Artificial Sequence
  Synthetic polynucleotide
ctaatacgactcactataggcactgtggggcactgctgcacaaagccccaaggccaagcggcacggtggccctggctggcgaatgtcgcgcacccagtctctcgcagcagcgcctggcgcgacgactcagttggatacagatcaggtcag

SEQ ID NO: 1304 - DNA, 150 bp, Artificial Sequence
  Synthetic polynucleotide
ctaatacgactcactataggcactgttcactctgtcaccaggctggagtgcagtggcatgatcttggctcactgcagcctcgacctctggggcttaggtgatcctcccacctaagccctccaagtatcagttggatacagatcaggtcag

SEQ ID NO: 1305 - DNA, 150 bp, Artificial Sequence
  Synthetic polynucleotide
ctaatacgactcactataggcactgttacgcggggcagtggcctgcgccgctggcgcggaggagacgacccttggccccgaaacgcgggctcagctcctacgaaagaaaccatagaaaaaggcagatcagttggatacagatcaggtcag

SEQ ID NO: 1306 - DNA, 150 bp, Artificial Sequence
  Synthetic polynucleotide
ctaatacgactcactataggcactgtctgcgctacagcctggccgacgaggcctccatggacagcggggcacgctggcagcgcgggaggctggcgctgcgccgggccccgggccccgatggccccgtcagttggatacagatcaggtcag

SEQ ID NO: 1307 - DNA, 150 bp, Artificial Sequence
  Synthetic polynucleotide
ctaatacgactcactataggcactgtcagtgcgagagagggctgcgactggagaccctttcctcgtctgggcatgcggcgcggtcagccagaccgacgggctgcagtgccgggccacgcgcgagcgtcagttggatacagatcaggtcag

SEQ ID NO: 1308 - DNA, 150 bp, Artificial Sequence
  Synthetic polynucleotide
ctaatacgactcactataggcactgtgctcgccgggtctccggcatagaaaggcctaagcatcgtccaagtcaggccgggctgccgctgggctgtggccgggcctgggggcccagtttaggcctcttcagttggatacagatcaggtcag

SEQ ID NO: 1309 - DNA, 150 bp, Artificial Sequence
  Synthetic polynucleotide
ctaatacgactcactataggcactgtgcaggtcgcctcgcttgaatccaggaggcggaggttgcagtgagctgagggcatcccactgcactccagcctgggcgacagagcaagactctgtctcgagtcagttggatacagatcaggtcag

SEQ ID NO: 1310 - DNA, 150 bp, Artificial Sequence
  Synthetic polynucleotide
ctaatacgactcactataggcactgttctgctcaaaattgctaccctgaggagagggctgtgaccaggcaggacggggtgtgataacatggaacgcagggcctgctggagcaggccctgatgagtgtcagttggatacagatcaggtcag

SEQ ID NO: 1311 - DNA, 150 bp, Artificial Sequence
  Synthetic polynucleotide
ctaatacgactcactataggcactgtttgcgtcagtgtcatcgacagatgcagcagcaggcggctactgcacaagctgcagcagctgcccaggcagcagccgtggcaggaaacatccctggcccagtcagttggatacagatcaggtcag

SEQ ID NO: 1312 - DNA, 150 bp, Artificial Sequence
  Synthetic polynucleotide
ctaatacgactcactataggcactgtgtgctgggattacaggagtgagccaccatgtccggccggaaatgtttattaaaatagcagatgaggccgggtgctgtgactcaggcctgtaatcccagcatcagttggatacagatcaggtcag

SEQ ID NO: 1313 - DNA, 150 bp, Artificial Sequence
  Synthetic polynucleotide
ctaatacgactcactataggcactgtcgctcagcatggtaggcctgagtgctaggcctaccacttgctcacaccagtgccaggcctgagtccgaaggcctctgctcagccctgagaagaaggcctgtcagttggatacagatcaggtcag

SEQ ID NO: 1314 - DNA, 150 bp, Artificial Sequence
  Synthetic polynucleotide
ctaatacgactcactataggcactgttattatttcttttttgagacagagtctctctctgttgcccaggctggagtgcagtggtgtaatcatggctcactgcatcctcgacctcctgggctcaagttcagttggatacagatcaggtcag

SEQ ID NO: 1315 - DNA, 150 bp, Artificial Sequence
  Synthetic polynucleotide
ctaatacgactcactataggcactgtggaacgcgaccgggcctgggcctcggagcgcgggcgggagcgcgaggaggagcgcggcggtgactggccctccgccgccgctgagccactgcggccgggctcagttggatacagatcaggtcag

SEQ ID NO: 1316 - DNA, 150 bp, Artificial Sequence
  Synthetic polynucleotide
ctaatacgactcactataggcactgtcggcacagctcctgcagcggccgcacgcggcgctggcgcagcggggcccccagcatgcggcgcggcgccgccacgtagtgctccagcagctcgaagaggctcagttggatacagatcaggtcag

SEQ ID NO: 1317 - DNA, 150 bp, Artificial Sequence
  Synthetic polynucleotide
ctaatacgactcactataggcactgtccgcggggccccggcggccgcgtccgtgacgagggaggtgaccgaggctcggcctccacgcagccggcgccccggggctgccctcgcgtcagcccgggagtcagttggatacagatcaggtcag

SEQ ID NO: 1318 - DNA, 150 bp, Artificial Sequence
  Synthetic polynucleotide
ctaatacgactcactataggcactgttcactatgttgcccaggatgatgttgaactcctgggctcaaagtgatcctccatccttggcctcccaaagtgctaagattataggcatgagccactgcactcagttggatacagatcaggtcag

SEQ ID NO: 1319 - DNA, 150 bp, Artificial Sequence
  Synthetic polynucleotide
ctaatacgactcactataggcactgttcgggacgcgcggcccacgtgcggcggaggggcagctgggtcgctcggggaacggggcaccggatggccccggttgggcccgcgccaggatgcgcccctgtcagttggatacagatcaggtcag

SEQ ID NO: 1320 - DNA, 150 bp, Artificial Sequence
  Synthetic polynucleotide
ctaatacgactcactataggcactgtcggagggtcgcgagacgcggcgtgcacccccgccccgtccgggcccgcaccacgtgcttcgccgcggacctttgtgaggtcgcccgggcctcccgcgcgctcagttggatacagatcaggtcag

SEQ ID NO: 1321 - DNA, 150 bp, Artificial Sequence
  Synthetic polynucleotide
ctaatacgactcactataggcactgtgttggccaggctggtctcgaactcctgacctcaggtgatctgcctgcctcggcctcccagagtgctgggattacaggcgtgagccaccatgcccagctaatcagttggatacagatcaggtcag

SEQ ID NO: 1322 - DNA, 150 bp, Artificial Sequence
  Synthetic polynucleotide
ctaatacgactcactataggcactgtttaggccaggcacagtggctcacgcctgtaatcccagcactttgggaggctgaagtgggcagatcacctgaggtcaggagttcgaggccagcctggccaatcagttggatacagatcaggtcag

SEQ ID NO: 1323 - DNA, 150 bp, Artificial Sequence
  Synthetic polynucleotide
ctaatacgactcactataggcactgtctcggggggcccgccgttcccggccagctgctgccgccgcttccactggatcagctcgtcatccaggatgatggtctgctgcttccgcagcagctgcaggtcagttggatacagatcaggtcag

SEQ ID NO: 1324 - DNA, 150 bp, Artificial Sequence
  Synthetic polynucleotide
ctaatacgactcactataggcactgttatcagtcagcaggagggaaacgtagcctttcctcatttgccagggatgtgacgctggaagcatccctggcccccggggctggaagccctgcccgaggggtcagttggatacagatcaggtcag

SEQ ID NO: 1325 - DNA, 150 bp, Artificial Sequence
  Synthetic polynucleotide
ctaatacgactcactataggcactgtctcttccttcacaggggctaccctaagaggctgggaagcctcccagcctgggctagtgagatcccagcccagattccaggcctggatctggggccttgaatcagttggatacagatcaggtcag

SEQ ID NO: 1326 - DNA, 150 bp, Artificial Sequence
  Synthetic polynucleotide
ctaatacgactcactataggcactgtccagctacttggaaggctgaggcaggaggactgcttgagctggggaggccgaggctgcagtgagccgtgattgcaccactgcactccagtctgggcaacatcagttggatacagatcaggtcag

SEQ ID NO: 1327 - DNA, 150 bp, Artificial Sequence
  Synthetic polynucleotide
ctaatacgactcactataggcactgtgcgccgccgcgccgttgggaggcagcgtcagcgcggggaagaacggcggctggtgacccagcaccgcgctcatggcgaagtccggcgcccggtgaggtagtcagttggatacagatcaggtcag

SEQ ID NO: 1328 - DNA, 150 bp, Artificial Sequence
  Synthetic polynucleotide
ctaatacgactcactataggcactgtgggccgggcctgagtggcagcgccgagctggtacagcggcggcccgcacacctggtaggcgcagctgggagccaccagcacaaagagcgcgcagcgtgcctcagttggatacagatcaggtcag

SEQ ID NO: 1329 - DNA, 150 bp, Artificial Sequence
  Synthetic polynucleotide
ctaatacgactcactataggcactgtttttttaagacagagtttcactctgtcacccaggctggagtgcaatggtgcgatctcggctcactgcaacctccatctcctgggttcaagcaattctccttcagttggatacagatcaggtcag

SEQ ID NO: 1330 - DNA, 150 bp, Artificial Sequence
  Synthetic polynucleotide
ctaatacgactcactataggcactgtgaagttggttatctgaaggcggccggggagcagcggcccggagcggcagcctgagctgccaaagcagccagcgcacctgggccactccgcccatggcgattcagttggatacagatcaggtcag

SEQ ID NO: 1331 - DNA, 150 bp, Artificial Sequence
  Synthetic polynucleotide
ctaatacgactcactataggcactgttgtgaacgttgccacaacgcccggcaacttcacgccagccacgccccagaccacacaaggcacttggatcccgggaagtgccaagcctgcctccaggatgtcagttggatacagatcaggtcag

SEQ ID NO: 1332 - DNA, 150 bp, Artificial Sequence
  Synthetic polynucleotide
ctaatacgactcactataggcactgtggaggagctggggtcccccagcggagcctgggatggagcagggatggctgccccagggagggggcggtggggccttccatcctgctctgccctcctcgtctcagttggatacagatcaggtcag

SEQ ID NO: 1333 - DNA, 150 bp, Artificial Sequence
  Synthetic polynucleotide
ctaatacgactcactataggcactgtcttggcctcccaaagtgctgggattacaggcatgagccactgcgcccagccaagcaggggaggcccttagcctctgtaagcttcagttttttcaactgtgtcagttggatacagatcaggtcag

SEQ ID NO: 1334 - DNA, 150 bp, Artificial Sequence
  Synthetic polynucleotide
ctaatacgactcactataggcactgtatttatgttccagacacatctcatctgatatacaatattttcttaaattgtataaagagaaattattgtacatcggatgagctgtgtctgggattaagtatcagttggatacagatcaggtcag

SEQ ID NO: 1335 - DNA, 150 bp, Artificial Sequence
  Synthetic polynucleotide
ctaatacgactcactataggcactgtgggggccggggctgtggcgccctggccttggtcaaggcctgtcctggctgcactgggcttggggtacagcgaggcctgtggctgccatggccatggactatcagttggatacagatcaggtcag

SEQ ID NO: 1336 - DNA, 150 bp, Artificial Sequence
  Synthetic polynucleotide
ctaatacgactcactataggcactgtctgcctcggcctcccaaagtgctgggaccacgcccagcagctttctttatagtcttaaaaaatggctgcagactgggcgtggtggcccacgcctgtagtctcagttggatacagatcaggtcag

SEQ ID NO: 1337 - DNA, 150 bp, Artificial Sequence
  Synthetic polynucleotide
ctaatacgactcactataggcactgtgggcagcagccaggcggggccagcagcgggactggggctgggggcagggcttatgcctgccagcccctgacacgcattgtgtctcgcagctgatgcggaatcagttggatacagatcaggtcag

SEQ ID NO: 1338 - DNA, 150 bp, Artificial Sequence
  Synthetic polynucleotide
ctaatacgactcactataggcactgtctcggccgcggcgccccgaaaagagaccccattcattctgcccgctccagttttccgccgcgcggcccacgaggcggcggctccggagggcgcgcaagggtcagttggatacagatcaggtcag

SEQ ID NO: 1339 - DNA, 150 bp, Artificial Sequence
  Synthetic polynucleotide
ctaatacgactcactataggcactgttgggacaattatatgaaactgccagtattcaactggcattgacctacaaatggcagtttggcagtttcataaagttcaaactaagatatgtgaatgattatcagttggatacagatcaggtcag

SEQ ID NO: 1340 - DNA, 150 bp, Artificial Sequence
  Synthetic polynucleotide
ctaatacgactcactataggcactgtctgccgcctggcacgggccgccgcatccacagctaccgaggtacgggcccggcgcttaggcccgacccagcagggacgatagcacggtctgaagcccctctcagttggatacagatcaggtcag

SEQ ID NO: 1341 - DNA, 150 bp, Artificial Sequence
  Synthetic polynucleotide
ctaatacgactcactataggcactgttggacagtgaaggcgctcaggcactgctcctcgtgcggctccgcgccgccccagctcggctcctgtttgatgaaggagtgaggcggcggcggcgggggtgtcagttggatacagatcaggtcag

SEQ ID NO: 1342 - DNA, 150 bp, Artificial Sequence
  Synthetic polynucleotide
ctaatacgactcactataggcactgtagtgctagctactctcaaggctgaggcaagagggcaggatgcaatggctcacgcctataatcccagcactctgggagggtgaggatcacctgaagtcaggtcagttggatacagatcaggtcag

SEQ ID NO: 1343 - DNA, 150 bp, Artificial Sequence
  Synthetic polynucleotide
ctaatacgactcactataggcactgtcagagagggctctatggggaacccatgaggaagggacaccatcttcccttcctcagaggccgctgtgcatttgttcctgctgcgagagttcgaggagggttcagttggatacagatcaggtcag

SEQ ID NO: 1344 - DNA, 150 bp, Artificial Sequence
  Synthetic polynucleotide
ctaatacgactcactataggcactgtcggggccggggcagccggagccggagccggagccggagccgcaggagccgccgcagccggagccaaagttcctctaggtcccgaagtcgtggcaggaggatcagttggatacagatcaggtcag

SEQ ID NO: 1345 - DNA, 150 bp, Artificial Sequence
  Synthetic polynucleotide
ctaatacgactcactataggcactgtagccattttttgagggcctgtgcatgcctaggccctcaaaaacatgtcccatgttagctgcaaactgccagctaccctgcaaagcacatcatgatcccagtcagttggatacagatcaggtcag

SEQ ID NO: 1346 - DNA, 150 bp, Artificial Sequence
  Synthetic polynucleotide
ctaatacgactcactataggcactgtcataccacagaggcagagtgtggtggctcacgcctgtaatcccagcacactgggagatagaggtgggcggactgcttgagcccaggagttggacaccagctcagttggatacagatcaggtcag

SEQ ID NO: 1347 - DNA, 150 bp, Artificial Sequence
  Synthetic polynucleotide
ctaatacgactcactataggcactgtatgggagctgctgcaaagttggcgtttgccgtctttcttatctcctgttcttcaggtaggtgcagggagcgcggcgcggtggggctgctcctgcggccgctcagttggatacagatcaggtcag

SEQ ID NO: 1348 - DNA, 150 bp, Artificial Sequence
  Synthetic polynucleotide
ctaatacgactcactataggcactgtcactgtgggtcaggccccccaaagcggcacccacttagacatgggggccaggacccacgcgccatgggcaggactgggtgggcccctgagggccagctggtcagttggatacagatcaggtcag

SEQ ID NO: 1349 - DNA, 150 bp, Artificial Sequence
  Synthetic polynucleotide
ctaatacgactcactataggcactgttgcctgccactcacctcctgctgtgtggcctggttcctaataggccacagagcagtactggtcggtggcctgggggttggggacccctggcctactggattcagttggatacagatcaggtcag

SEQ ID NO: 1350 - DNA, 150 bp, Artificial Sequence
  Synthetic polynucleotide
ctaatacgactcactataggcactgtcctatatggagactggctggaaggcctgtccaactggttggggcttatccaggcaggacctggccccactggaagaggacagggagcccaagcaggccaatcagttggatacagatcaggtcag

SEQ ID NO: 1351 - DNA, 150 bp, Artificial Sequence
  Synthetic polynucleotide
ctaatacgactcactataggcactgtacccagcttgtagctttataagctgggttttgaacctcagttttctagttagtaaagtgatcatgagaataacgacctcaaaggatatcatgaggattaatcagttggatacagatcaggtcag

SEQ ID NO: 1352 - DNA, 150 bp, Artificial Sequence
  Synthetic polynucleotide
ctaatacgactcactataggcactgtgctgcggcggcgcagtgccgctatggggacctggcgagcctgcatggcgcgggtgcagcgggacccggttctgggtcaccctcagccgccgcttcctcattcagttggatacagatcaggtcag

SEQ ID NO: 1353 - DNA, 150 bp, Artificial Sequence
  Synthetic polynucleotide
ctaatacgactcactataggcactgttcgcccagctcggcccggggctaccagggctaccccgggggcgactacagtggcgggccccaggacgggggcgccggcaagggcccggcggacatggccttcagttggatacagatcaggtcag

SEQ ID NO: 1354 - DNA, 150 bp, Artificial Sequence
  Synthetic polynucleotide
ctaatacgactcactataggcactgtcgggggcaaaaggcgttcttttcgctcccagccggtggcacggaggcggacggcggcggggctgtttttggcctggtggctcgcgtgcgcgcggcgggcgtcagttggatacagatcaggtcag

SEQ ID NO: 1355 - DNA, 150 bp, Artificial Sequence
  Synthetic polynucleotide
ctaatacgactcactataggcactgtattagctgggattacaggcgggcacctgtaatcccagctactagggaggctgaggcaggagaatcacttgaacccgggaggcagaggttgcagtgagctgtcagttggatacagatcaggtcag

SEQ ID NO: 1356 - DNA, 150 bp, Artificial Sequence
  Synthetic polynucleotide
ctaatacgactcactataggcactgtgagacaaggtctcactctgtcacccaggctggagtacagtggcgtgatcactgtactccagctcactgcaacctcgacctcctggactcaattgattctctcagttggatacagatcaggtcag

SEQ ID NO: 1357 - DNA, 150 bp, Artificial Sequence
  Synthetic polynucleotide
ctaatacgactcactataggcactgtggggctccgagaggcggtgcttgggaagcctcggggccgggaggagggggcttgcagcagcgggggcggccccgggactgagccggcatccctgagcctgtcagttggatacagatcaggtcag

SEQ ID NO: 1358 - DNA, 150 bp, Artificial Sequence
  Synthetic polynucleotide
ctaatacgactcactataggcactgtgtttgcagggagcagacgtcccgacttggggaggttccagcttccgggaacctcccactgccagccatgtgtgacccagggcccttccaaggctggcttttcagttggatacagatcaggtcag

SEQ ID NO: 1359 - DNA, 150 bp, Artificial Sequence
  Synthetic polynucleotide
ctaatacgactcactataggcactgtaagcatatctgaatgcaaaaggaagaataacgttattagaagaataattctcagaggtggtgctgggtgggctggtgggctgcgctgcagcccacgagcatcagttggatacagatcaggtcag

SEQ ID NO: 1360 - DNA, 150 bp, Artificial Sequence
  Synthetic polynucleotide
ctaatacgactcactataggcactgtaaagagggagtcacagccctggcttggggagctcccaggtctgggctccccagagggctgcagctcttctttccttctcttcacctgcaacaaggtgagctcagttggatacagatcaggtcag

SEQ ID NO: 1361 - DNA, 150 bp, Artificial Sequence
  Synthetic polynucleotide
ctaatacgactcactataggcactgttctgccctaaagcccaggctgcccagcagcgagcagcctctggctggggaccggcgttccccacacactggggccctgcagcctccctgcagactgggcttcagttggatacagatcaggtcag

SEQ ID NO: 1362 - DNA, 150 bp, Artificial Sequence
  Synthetic polynucleotide
ctaatacgactcactataggcactgtaagaagcaggtgggccgagatgatgaaggccaggcacccactgagcagcagcctgggctgggcctgccacctgcaatcttcaacccagcacctctgctgttcagttggatacagatcaggtcag

SEQ ID NO: 1363 - DNA, 150 bp, Artificial Sequence
  Synthetic polynucleotide
ctaatacgactcactataggcactgtcctggggacctggggtcagccccatcatgccagcctcccccagggccccaaactccgcaggtgctcaacattatctgctgcagggcattctcagacacagtcagttggatacagatcaggtcag

SEQ ID NO: 1364 - DNA, 150 bp, Artificial Sequence
  Synthetic polynucleotide
ctaatacgactcactataggcactgtgggaggggggagggaggcaggcaccgccccctactccagctcccacctccagctagactgaggccagaggcggccttcggaccccacagtagggtgggagtcagttggatacagatcaggtcag

SEQ ID NO: 1365 - DNA, 150 bp, Artificial Sequence
  Synthetic polynucleotide
ctaatacgactcactataggcactgttgggggaggggaggtgtgggcggctccccccgggggctccagggtgggaacctcacgaggcagtgtgggaatggagaggtccgctccactgctgcgcccctcagttggatacagatcaggtcag

SEQ ID NO: 1366 - DNA, 150 bp, Artificial Sequence
  Synthetic polynucleotide
ctaatacgactcactataggcactgtcacatgcctgtaatcccaactactcaggaggctcaggcacaaaaatagctttaacctgggaggcagaggttgcagtgagctgagatcgcaccactgcacttcagttggatacagatcaggtcag

SEQ ID NO: 1367 - DNA, 150 bp, Artificial Sequence
  Synthetic polynucleotide
ctaatacgactcactataggcactgttccaaaataaacaccagccagccgccgagcccggagtcgggagggcggcagggtggcgccagcactcacctcctccggaatggcagggtccgcagccgaatcagttggatacagatcaggtcag

SEQ ID NO: 1368 - DNA, 150 bp, Artificial Sequence
  Synthetic polynucleotide
ctaatacgactcactataggcactgtgaggcaggagaatggcgtgaacccaggaagcagagcttgcagtaagccgagatggcgccactgcactctagcctgggcgagagtgcgagactccgtctcatcagttggatacagatcaggtcag

SEQ ID NO: 1369 - DNA, 150 bp, Artificial Sequence
  Synthetic polynucleotide
ctaatacgactcactataggcactgtagctctgccctttggctcttcagtctacagcccctgcagctgctttcatgggctgccattgagtgacagctgcacagtgcaggctgtcagtgggggatgatcagttggatacagatcaggtcag

SEQ ID NO: 1370 - DNA, 150 bp, Artificial Sequence
  Synthetic polynucleotide
ctaatacgactcactataggcactgtccctgttgtccaggctggagtgcagtggtgtgagctcagctcactgccacctcccaggttcaagcgattttcctgcctcagcctcccaggtagctgggattcagttggatacagatcaggtcag

SEQ ID NO: 1371 - DNA, 150 bp, Artificial Sequence
  Synthetic polynucleotide
ctaatacgactcactataggcactgtgaggccctgagggcccttttcaccctcctcctgggttccggaggtctgcctggtggcagaggctcccacctggcctgcctcccaggcgtgcagtgtgccctcagttggatacagatcaggtcag

SEQ ID NO: 1372 - DNA, 150 bp, Artificial Sequence
  Synthetic polynucleotide
ctaatacgactcactataggcactgtggtcccgcctcgaggccgccccgacgacgcggccggcccccgatcctggatctgcgttgtcgcccgtaattaccgtttagaggtccaacacggtggcctctcagttggatacagatcaggtcag

SEQ ID NO: 1373 - DNA, 150 bp, Artificial Sequence
  Synthetic polynucleotide
ctaatacgactcactataggcactgtccagggagaagcgggacgaaggctgctttgggggttgcaccccagccaaatccagctgggcccagggacaggcatcatcccaacccaggggccagccacatcagttggatacagatcaggtcag

SEQ ID NO: 1374 - DNA, 150 bp, Artificial Sequence
  Synthetic polynucleotide
ctaatacgactcactataggcactgtgggcggccgggcagaggcgcccctcacctcccggacggggcggctggccaggcagggggctgatccccccacctccctcccggacggggcggctggccggtcagttggatacagatcaggtcag

SEQ ID NO: 1375 - DNA, 150 bp, Artificial Sequence
  Synthetic polynucleotide
ctaatacgactcactataggcactgtaagtactaggattacaagcgtgagccactgtgttaggcccaagtttctctttaaaggccttcatttttggccaggcacagtggctcactcctgtagtccctcagttggatacagatcaggtcag

SEQ ID NO: 1376 - DNA, 150 bp, Artificial Sequence
  Synthetic polynucleotide
ctaatacgactcactataggcactgttttgctccatcccagagcaggcactgtgagcagggtgaggccagacagcaggagcaggcacttccaagcctgctggggtagggggacttcctgggccccctcagttggatacagatcaggtcag

SEQ ID NO: 1377 - DNA, 150 bp, Artificial Sequence
  Synthetic polynucleotide
ctaatacgactcactataggcactgtagggctctgagccatactacctccttgcagagccgccccccaggcccttcctggacatgggggagggcaccaagaaccgaatcatcacagccgaggggattcagttggatacagatcaggtcag

SEQ ID NO: 1378 - DNA, 150 bp, Artificial Sequence
  Synthetic polynucleotide
ctaatacgactcactataggcactgtgctactgacctttgggattccggtaccggtcctccgatctggctgctggtactggctcagctgctgggtgggaggaagtgggcggggccagtcagggccttcagttggatacagatcaggtcag

SEQ ID NO: 1379 - DNA, 150 bp, Artificial Sequence
  Synthetic polynucleotide
ctaatacgactcactataggcactgttgcctgtagtcccagcactttgggaggctgagctcaagtgggaggatcacttgagctcaggagttcaagaccaacctgggcaacatagggaaactttgtttcagttggatacagatcaggtcag

SEQ ID NO: 1380 - DNA, 150 bp, Artificial Sequence
  Synthetic polynucleotide
ctaatacgactcactataggcactgttcctcttgagtaggtgagcagatttgagaagccatggtaagtaattgtggtttctgccattgaaagtcatggcagaaaccacagttacttttgcaccaactcagttggatacagatcaggtcag

SEQ ID NO: 1381 - DNA, 150 bp, Artificial Sequence
  Synthetic polynucleotide
ctaatacgactcactataggcactgtgtggcggggtcggcgcagttgggctccgcgccgtggagcagcagcagctccgccactcgggcgctgcccatcatcatgacctgccagagagaacagaatgtcagttggatacagatcaggtcag

SEQ ID NO: 1382 - DNA, 150 bp, Artificial Sequence
  Synthetic polynucleotide
ctaatacgactcactataggcactgtagggaacctgcccttgcacttggctgccaaagaaggccacctccgggtggtggagttcctggtgaagcacacggccagcaatgtggggcatcggaaccattcagttggatacagatcaggtcag

SEQ ID NO: 1383 - DNA, 150 bp, Artificial Sequence
  Synthetic polynucleotide
ctaatacgactcactataggcactgtccgtgcgctcccccgggcatgacggcgccgccggggcccgcgggcgcgcccgggtagtcaaagtcgccgccgccgccgccgcccgtggggcccacggccgtcagttggatacagatcaggtcag

SEQ ID NO: 1384 - DNA, 150 bp, Artificial Sequence
  Synthetic polynucleotide
ctaatacgactcactataggcactgttgaaatagaatgcagtgagggcttgggtgggcactcagacggtggcaggaaggccctgccgctgctgcagccttgccatgctgcctgtgccctgcacaggtcagttggatacagatcaggtcag

SEQ ID NO: 1385 - DNA, 150 bp, Artificial Sequence
  Synthetic polynucleotide
ctaatacgactcactataggcactgtatggcgtggaggctttgggtctccacaggggtcagggactgaggacaggttctgtgggggcaggaggggccaagcaggtgctctgcagcccctgagcctgtcagttggatacagatcaggtcag

SEQ ID NO: 1386 - DNA, 150 bp, Artificial Sequence
  Synthetic polynucleotide
ctaatacgactcactataggcactgtaagcttcaggattggccacagcccctctgggctggcctggctgcttcgggaagcagttccttggggagctctggagcaccctctccccaggggtcagccatcagttggatacagatcaggtcag

SEQ ID NO: 1387 - DNA, 150 bp, Artificial Sequence
  Synthetic polynucleotide
ctaatacgactcactataggcactgtacccctggacacagggggccctggagggcatcctagcacatggcttgccgctcaggtgctaccagtgtcactgccgcagctgtgatattctggcaggacatcagttggatacagatcaggtcag

SEQ ID NO: 1388 - DNA, 150 bp, Artificial Sequence
  Synthetic polynucleotide
ctaatacgactcactataggcactgtgcctgtcactgagctggtcttcaggtgacaggaagccaaactgtggccaggccatggccataggtggcctttctgcacccccagactttttggagctcagtcagttggatacagatcaggtcag

SEQ ID NO: 1389 - DNA, 150 bp, Artificial Sequence
  Synthetic polynucleotide
ctaatacgactcactataggcactgtctccaggctggggctccagtcgctccagtggccaggcaggggccagcggatgcagcgtatctgcagggtgtaggccgtggctgggaggagcccgcagagctcagttggatacagatcaggtcag

SEQ ID NO: 1390 - DNA, 150 bp, Artificial Sequence
  Synthetic polynucleotide
ctaatacgactcactataggcactgttacaaaaagttagccgggcgtggtggcaggcgcctgtagtcccagctacttgggaggctgaggcaggagaatggtgtgaacccgggaggcggagcttgcatcagttggatacagatcaggtcag

SEQ ID NO: 1391 - DNA, 150 bp, Artificial Sequence
  Synthetic polynucleotide
ctaatacgactcactataggcactgtgtcccagctactcgggtgcacgcagcctcggtgttctgggctcaagtgatcctcccatcccagctacccgagtagctgggactacaggtgcacgccaccatcagttggatacagatcaggtcag

SEQ ID NO: 1392 - DNA, 150 bp, Artificial Sequence
  Synthetic polynucleotide
ctaatacgactcactataggcactgtaggttgactgtgtagatgacatggactgccttgcataggaagttcccaaagtaccagtttgccacggcatcaactgcccagaagggaagcgtgatgacaatcagttggatacagatcaggtcag

SEQ ID NO: 1393 - DNA, 150 bp, Artificial Sequence
  Synthetic polynucleotide
ctaatacgactcactataggcactgtatgtgtgtgtatatacacacgtgtacatatgtgtgtatatacacacatatgtgtactacattttctttatcgacttgttcattgatgggcatttgggctgtcagttggatacagatcaggtcag

SEQ ID NO: 1394 - DNA, 150 bp, Artificial Sequence
  Synthetic polynucleotide
ctaatacgactcactataggcactgttggaggggtacgggaagactgaggctggaggggggcagtccagtctctcccagcagactcagttccccagtattgctctccgaaagtcccctgcaatccctcagttggatacagatcaggtcag

SEQ ID NO: 1395 - DNA, 150 bp, Artificial Sequence
  Synthetic polynucleotide
ctaatacgactcactataggcactgtcgtccaggctgaagggacctgggagcagtggctccagagcctggctacacagcacagtcacctggtggactgtaaaaatatgcaggttactgggctcagctcagttggatacagatcaggtcag

SEQ ID NO: 1396 - DNA, 150 bp, Artificial Sequence
  Synthetic polynucleotide
ctaatacgactcactataggcactgtccccaccactcatgtcctgctatgcagcccggttcctaacaggccatggattggtaccagtccatggcctgggggttggggacccctgatatatactgtatcagttggatacagatcaggtcag

SEQ ID NO: 1397 - DNA, 150 bp, Artificial Sequence
  Synthetic polynucleotide
ctaatacgactcactataggcactgttggagtctgtccaatgagctgcaaggggcttccacctgcttaggatccaaaacgcatcagggctgaaagggcctgaacagcaggctgagggagtgatcattcagttggatacagatcaggtcag

SEQ ID NO: 1398 - DNA, 150 bp, Artificial Sequence
  Synthetic polynucleotide
ctaatacgactcactataggcactgtcaggaggaatgtctgactctttgggggtcgggggtggggaggaggggcgcacacacacgtgtgtgtgtgtgtgtgcgcgcgcgcgcacgcgtgcgtgccgtcagttggatacagatcaggtcag

SEQ ID NO: 1399 - DNA, 150 bp, Artificial Sequence
  Synthetic polynucleotide
ctaatacgactcactataggcactgtggtccgaggggcgcggggccggggggcgaggccgttccccgcccgttcccagggcccgcccaggccgggctgcagggagcgccccgccttcgggaagacctcagttggatacagatcaggtcag

SEQ ID NO: 1400 - DNA, 150 bp, Artificial Sequence
  Synthetic polynucleotide
ctaatacgactcactataggcactgtatcattgggtgcacctgtgatagacatggggctgtgccacgcagacccacgttcaaggagggacttgctgcctggctgtggagggcacagacagcaaggatcagttggatacagatcaggtcag

SEQ ID NO: 1401 - DNA, 150 bp, Artificial Sequence
  Synthetic polynucleotide
ctaatacgactcactataggcactgtcctgcccaggcgggctactgtgctgcccagtcacccgggtctggggcggccaccgctggccagcaggcaggccctccagaggcagaggtggccacgcttatcagttggatacagatcaggtcag

SEQ ID NO: 1402 - DNA, 150 bp, Artificial Sequence
  Synthetic polynucleotide
ctaatacgactcactataggcactgtgggtcaggcatggtggctcatgcctgtaatcccagcactttgggaggctgaggtgggtgtatcacctgaggtcagcagtttgagacaagcctggccaacatcagttggatacagatcaggtcag

SEQ ID NO: 1403 - DNA, 150 bp, Artificial Sequence
  Synthetic polynucleotide
ctaatacgactcactataggcactgtacccatccctgggcagcctggcatgccccaggggcagccagggctacagccacctaccatgccaggtcagcagggggtccactccaatccagccatgcagtcagttggatacagatcaggtcag

SEQ ID NO: 1404 - DNA, 150 bp, Artificial Sequence
  Synthetic polynucleotide
ctaatacgactcactataggcactgtctgtggggactgcctgcgaaacgccttggaggccgctgtgtgagctgcggctccgggctggtggccacgcgagggtgtccgccctcttcgacctgcctggtcagttggatacagatcaggtcag

SEQ ID NO: 1405 - DNA, 150 bp, Artificial Sequence
  Synthetic polynucleotide
ctaatacgactcactataggcactgttgccagctggttctggagtcttgccctgaggaggtggccagggtgagggtgccagcgcaggaacctttggcgcatgcttcaccctggcctgggatctgcatcagttggatacagatcaggtcag

SEQ ID NO: 1406 - DNA, 150 bp, Artificial Sequence
  Synthetic polynucleotide
ctaatacgactcactataggcactgtgccgctgtctaaaggtccattgctccctaagcaatagagggcccccagtagggggagctaggggcatctgctccagggaaaggaaccctgtgtccttgtgtcagttggatacagatcaggtcag

SEQ ID NO: 1407 - DNA, 150 bp, Artificial Sequence
  Synthetic polynucleotide
ctaatacgactcactataggcactgtgcccgggtgctacgcccctcattgcccggggccggcagggccgccggctgctccgagtgcggggccgccaagcccacgcccacccggaactccagctggctcagttggatacagatcaggtcag

SEQ ID NO: 1408 - DNA, 150 bp, Artificial Sequence
  Synthetic polynucleotide
ctaatacgactcactataggcactgtaaggtttcaccatgttggctaggttggtctcgctcaagcgatccacccaccttggcctcccaaaatgttgggatgacaggcgtgagtcactgcgcctggatcagttggatacagatcaggtcag

SEQ ID NO: 1409 - DNA, 150 bp, Artificial Sequence
  Synthetic polynucleotide
ctaatacgactcactataggcactgtcgccaacgcgcaggtctacggtcagaccggcctcccctacggccccgggtctgaggctgcggcgttcggctccaacggcctggggggtttccccccactctcagttggatacagatcaggtcag

SEQ ID NO: 1410 - DNA, 150 bp, Artificial Sequence
  Synthetic polynucleotide
ctaatacgactcactataggcactgtctcgctcttgttgcccaggctggagtgcagtggcatgatatcagctcactgcaacctccgccgcctgggttcaagcaattcttctgcctcagcctcctgatcagttggatacagatcaggtcag

SEQ ID NO: 1411 - DNA, 150 bp, Artificial Sequence
  Synthetic polynucleotide
ctaatacgactcactataggcactgtaggaggccataccaccgccactgaaggtggcaaaggccgaaggccgtgctgggccatacgggaccatgccagggttggtctggaggtggaaggaaccgggtcagttggatacagatcaggtcag

SEQ ID NO: 1412 - DNA, 150 bp, Artificial Sequence
  Synthetic polynucleotide
ctaatacgactcactataggcactgtaccaccagcctgtgaaggcagctgggagtgggactgtaccctgcaaagccacaggggcagagctgcccaagaccatgggagcccatgtcttgcatcagcatcagttggatacagatcaggtcag

SEQ ID NO: 1413 - DNA, 150 bp, Artificial Sequence
  Synthetic polynucleotide
ctaatacgactcactataggcactgttcccagcaatctgggaggctgaggctgaaacaggcagctcacttgaggccaggagttcaaaaccagcctggccaacatggcaaaacctgtctctattaaatcagttggatacagatcaggtcag

SEQ ID NO: 1414 - DNA, 150 bp, Artificial Sequence
  Synthetic polynucleotide
ctaatacgactcactataggcactgtggtggctctgcctgtaatcccagccctctgggagaccgaggcaggtggatcaactgcggtcaggagttcgagaccagcctggccaacatggtggagcccttcagttggatacagatcaggtcag

SEQ ID NO: 1415 - DNA, 150 bp, Artificial Sequence
  Synthetic polynucleotide
ctaatacgactcactataggcactgttccaggctgcccccagccagcaccttaccttgttcaggcaaggtcggggacggcctagcggtgcagagtgtggctgtgaccagcacagcccagaagaggatcagttggatacagatcaggtcag

SEQ ID NO: 1416 - DNA, 150 bp, Artificial Sequence
  Synthetic polynucleotide
ctaatacgactcactataggcactgtggggagctgcaaatttaagagggaaatttgcagcatctcctagtcaagaactctacggccaggtgcggtggttcacacctgtaatcccagcactttgggatcagttggatacagatcaggtcag

SEQ ID NO: 1417 - DNA, 150 bp, Artificial Sequence
  Synthetic polynucleotide
ctaatacgactcactataggcactgtcctccagcgtccccgctgccgaccctgcccctgcctgggggccgagggcgcttccccgtgggtgcgcgccgagctccaggcaagcgaggggcgcgtgtcctcagttggatacagatcaggtcag

SEQ ID NO: 1418 - DNA, 150 bp, Artificial Sequence
  Synthetic polynucleotide
ctaatacgactcactataggcactgtatccaagggccgggccaggagaggtccttggccacctggcgccgagttcgcggccgcagactcccacggacggcccagcacccgagcgcgcgggccgagctcagttggatacagatcaggtcag

SEQ ID NO: 1419 - DNA, 150 bp, Artificial Sequence
  Synthetic polynucleotide
ctaatacgactcactataggcactgtagtcggcgctggggttagaggcgccagaggggtccttgcggctctcagggccgcccttggcgccgctgcccccgcttccgctcccgcccccgccgccggctcagttggatacagatcaggtcag

SEQ ID NO: 1420 - DNA, 150 bp, Artificial Sequence
  Synthetic polynucleotide
ctaatacgactcactataggcactgtgccgcacccgcctgcggcgcctccggccccgaagagccccttgccgggctggaagtgcgcgggcggcggccggaagggcctcttcatgcggcggcggcgctcagttggatacagatcaggtcag

SEQ ID NO: 1421 - DNA, 150 bp, Artificial Sequence
  Synthetic polynucleotide
ctaatacgactcactataggcactgttagttcccatttccatggggaatcatggagtggttctgccacattgctgagtggtcagcaataggccaagctccacactgcaatgctgtacattcattattcagttggatacagatcaggtcag

SEQ ID NO: 1422 - DNA, 150 bp, Artificial Sequence
  Synthetic polynucleotide
ctaatacgactcactataggcactgtagtggggtagagagggtgtccctggttgacacagagaggcaaaggtctggagttggggacacccgcagcctcctttttggcaggtgaaccggccactgactcagttggatacagatcaggtcag

SEQ ID NO: 1423 - DNA, 150 bp, Artificial Sequence
  Synthetic polynucleotide
ctaatacgactcactataggcactgttgcgcgggttccatgtagttgtgcgccaggcccgggtggtgtgagtcggggtgctgcgcattcagcacggccgggtgcgccatccagcgcggctgctcggtcagttggatacagatcaggtcag

SEQ ID NO: 1424 - DNA, 150 bp, Artificial Sequence
  Synthetic polynucleotide
ctaatacgactcactataggcactgtggtcagggccacggtgcagaggtaccctccgacccaccacggtgagtgcgcccggggtgccggggctcccgccggccgcttcagccgtcccggctcggggtcagttggatacagatcaggtcag

SEQ ID NO: 1425 - DNA, 150 bp, Artificial Sequence
  Synthetic polynucleotide
ctaatacgactcactataggcactgtgtttacaaaacagaagctcttgccctgccccgcccctgccctcccgagctcctaggttagctcctgggccgggggcggggcggtggggaaggtcggaaattcagttggatacagatcaggtcag

SEQ ID NO: 1426 - DNA, 150 bp, Artificial Sequence
  Synthetic polynucleotide
ctaatacgactcactataggcactgtagccgccccgtccgggagggaggtgcgggggtcagccccccgcccggccagccgccccgtccgggaggtgaggggcgcctctgcccggccgcccctcctgtcagttggatacagatcaggtcag

SEQ ID NO: 1427 - DNA, 150 bp, Artificial Sequence
  Synthetic polynucleotide
ctaatacgactcactataggcactgtaggggcgcggattcggccgggcgggggctcaaaaacggggcggggggccgtggcgacgcgggcgcgggtccccctcccccggcctgcccgctcagtgtcttcagttggatacagatcaggtcag

SEQ ID NO: 1428 - DNA, 150 bp, Artificial Sequence
  Synthetic polynucleotide
ctaatacgactcactataggcactgtgtgcaatactgtgcaggtggtacagaagatggggcagagagactggccagaccctgccttctctgccaggctggcctgctcctgtcagccacaggagccatcagttggatacagatcaggtcag

SEQ ID NO: 1429 - DNA, 150 bp, Artificial Sequence
  Synthetic polynucleotide
ctaatacgactcactataggcactgtttctcctgtctcagcctcccaagtagctgggactacaggcacatgccaccacgcccagctactttttgtatttttagtagagacaaggtttctccgtgtttcagttggatacagatcaggtcag

SEQ ID NO: 1430 - DNA, 150 bp, Artificial Sequence
  Synthetic polynucleotide
ctaatacgactcactataggcactgtaggcctttgtcttacctgcagcgcaccgatggctgcgctctgaaacctcaggtcggttttgaaatcctgcgcgatctccctcaccaacctctggaagggctcagttggatacagatcaggtcag

SEQ ID NO: 1431 - DNA, 150 bp, Artificial Sequence
  Synthetic polynucleotide
ctaatacgactcactataggcactgtgacttgcaactcctgttgagggggcagtcttggggactgagccctcaacctgacactgtctccaggtagatagtgttagaattgaattgaaggacacccatcagttggatacagatcaggtcag

SEQ ID NO: 1432 - DNA, 150 bp, Artificial Sequence
  Synthetic polynucleotide
ctaatacgactcactataggcactgtggcgctggaacggcagcttccgaatcagcaactcggtcgacttttggtagcggcggatctcgcgcagagccacagtgcccgggcggtaacggtgaggctttcagttggatacagatcaggtcag

SEQ ID NO: 1433 - DNA, 150 bp, Artificial Sequence
  Synthetic polynucleotide
ctaatacgactcactataggcactgtggcctgacctgcccagggccccagatgggactgggggctttggggtgagggtgggggcaggggatgctttcttacctggctgagtgagctctctcggtcatcagttggatacagatcaggtcag

SEQ ID NO: 1434 - DNA, 150 bp, Artificial Sequence
  Synthetic polynucleotide
ctaatacgactcactataggcactgtacccgcatcatgctacagcagcccctcaaaggtcagggtggcccggggccctcctgaactccaggtctggccagggtttgaccaccctgcacccagctcttcagttggatacagatcaggtcag

SEQ ID NO: 1435 - DNA, 150 bp, Artificial Sequence
  Synthetic polynucleotide
ctaatacgactcactataggcactgtttttgagacggagtctcgctctgtcgcccaggctgcagtgcagtggcgtgatttcggctcactgcaacctccgcctcccgggttcacgccattctcctgctcagttggatacagatcaggtcag

SEQ ID NO: 1436 - DNA, 150 bp, Artificial Sequence
  Synthetic polynucleotide
ctaatacgactcactataggcactgtcggcactcacagtggcgccgcggctgctcttgcgaggtgggggctgtcagggccgccggcgcccaggccggccgcgagcctgaggctctgcagagcgagctcagttggatacagatcaggtcag

SEQ ID NO: 1437 - DNA, 150 bp, Artificial Sequence
  Synthetic polynucleotide
ctaatacgactcactataggcactgtgtcctctccctcctcttgcctgaaccatcgcagcagaggtgggggcagggctttctgcctcctgcctcctgcctttctgctgccaggccctgtgtggttgtcagttggatacagatcaggtcag

SEQ ID NO: 1438 - DNA, 150 bp, Artificial Sequence
  Synthetic polynucleotide
ctaatacgactcactataggcactgtcagggaataaaataagcagatggagagtaaggatttgctaggaaataattcagccagtcactttgaaagctgttcaagaaacagctttcaaagtgtctcttcagttggatacagatcaggtcag

SEQ ID NO: 1439 - DNA, 150 bp, Artificial Sequence
  Synthetic polynucleotide
ctaatacgactcactataggcactgtaacaaacaaaaaatatacatatgggcttttatgtgtgtgtgtacacacacacatacatatatacaaagctctgtagagatggctggtctccacagaaatatcagttggatacagatcaggtcag

SEQ ID NO: 1440 - DNA, 150 bp, Artificial Sequence
  Synthetic polynucleotide
ctaatacgactcactataggcactgtagggcaggggcttcagctcagaaggccttgttgagaatggaatggagagcaggaacaagagagaggggcaaaggcattgccagcattctctgttcggctgtcagttggatacagatcaggtcag

SEQ ID NO: 1441 - DNA, 150 bp, Artificial Sequence
  Synthetic polynucleotide
ctaatacgactcactataggcactgtgacgtggagagacagtgctggaaccagcccctggatggaggggcctgggtggcctcctcaggagccctgcagctgctgagggatttgacatatgacttggtcagttggatacagatcaggtcag

SEQ ID NO: 1442 - DNA, 150 bp, Artificial Sequence
  Synthetic polynucleotide
ctaatacgactcactataggcactgtgggccttggggcccacccacagcggcccagggccagacgctggctggaagccaggacacagactgcagggtcttggccggcggccccatccccgggacgatcagttggatacagatcaggtcag

SEQ ID NO: 1443 - DNA, 150 bp, Artificial Sequence
  Synthetic polynucleotide
ctaatacgactcactataggcactgtagccgctccaggtccatgatgtacttggccatgagcgagtgccggtctgcctggcaggcggccacgcggcgcagggctctgcgcaccgtcctccgaatactcagttggatacagatcaggtcag

SEQ ID NO: 1444 - DNA, 150 bp, Artificial Sequence
  Synthetic polynucleotide
ctaatacgactcactataggcactgtcagggagatagggcaggagaccctggcccacatctgtcctggatgtgggtggtttggttgtcaagcacatgcagccaggtgtgggctgggaatccatgcctcagttggatacagatcaggtcag

SEQ ID NO: 1445 - DNA, 150 bp, Artificial Sequence
  Synthetic polynucleotide
ctaatacgactcactataggcactgtgcgaggaggcgtcccccagcctgacagccgaggagagggaggcgctcggcggactggacaggtacgggccgccgtcactcgcccggtcggctccggacggtcagttggatacagatcaggtcag

SEQ ID NO: 1446 - DNA, 150 bp, Artificial Sequence
  Synthetic polynucleotide
ctaatacgactcactataggcactgtttgagcagttagtatatgctgctatgctctatgactagagctatagcagggagcaaaacagagaacaattcctgttctcatggacacagagacctcactgtcagttggatacagatcaggtcag

SEQ ID NO: 1447 - DNA, 150 bp, Artificial Sequence
  Synthetic polynucleotide
ctaatacgactcactataggcactgtcctgtaatcccagcactttgggaggctgaggtgggcagatcacctgaggtcaggcgttcaagaccagcctgaccaacatggtgaaaccccatctctactatcagttggatacagatcaggtcag

SEQ ID NO: 1448 - DNA, 150 bp, Artificial Sequence
  Synthetic polynucleotide
ctaatacgactcactataggcactgtgcagaaaccctgcagttggccctgccacctctgcctcagccatctcctctggggctgggccactgtggctgggaaagcctttctgggttggaccctgacatcagttggatacagatcaggtcag

SEQ ID NO: 1449 - DNA, 150 bp, Artificial Sequence
  Synthetic polynucleotide
ctaatacgactcactataggcactgtatgaccgacgggctgccgtactcgctgccaggggcgctcagcgacgccttcagcacgaacttgcccatcagcccgccacctggcggctgcggctgctgcgtcagttggatacagatcaggtcag

SEQ ID NO: 1450 - DNA, 150 bp, Artificial Sequence
  Synthetic polynucleotide
ctaatacgactcactataggcactgtctgtagtcccagctacgtgggaggctgaggcaggagcatggcgtgaacctgggaggcagagcttgcagtgagccgaattggcaccactgcactccacccttcagttggatacagatcaggtcag

SEQ ID NO: 1451 - DNA, 150 bp, Artificial Sequence
  Synthetic polynucleotide
ctaatacgactcactataggcactgttgttgctgctgctgctgctgctgcagtttctgggccagctgcatacgttgctgctgcagctgcagctgcctttcctgtaaaagccttgaatcaggtccgatcagttggatacagatcaggtcag

SEQ ID NO: 1452 - DNA, 150 bp, Artificial Sequence
  Synthetic polynucleotide
ctaatacgactcactataggcactgttgaaaccctgtctctactaaaaatacaaaaattagctgggtgtggtagcaggtgcctgtaatcccagctactcaggaggctgaggcaggagaattgctgatcagttggatacagatcaggtcag

SEQ ID NO: 1453 - DNA, 150 bp, Artificial Sequence
  Synthetic polynucleotide
ctaatacgactcactataggcactgttccgttgtaaaagtgtaagaattatcacactgccttggacctgtggtcagctgtgcccaataatctgtccctgtctgcgacagtgagggacatattaatctcagttggatacagatcaggtcag

SEQ ID NO: 1454 - DNA, 150 bp, Artificial Sequence
  Synthetic polynucleotide
ctaatacgactcactataggcactgtgctgcctgctccatggggagaggggggagctctggcaggaccctgcggtgggccacatggagccaggcagggctggtgcccgtgctggatggggtgagagtcagttggatacagatcaggtcag

SEQ ID NO: 1455 - DNA, 150 bp, Artificial Sequence
  Synthetic polynucleotide
ctaatacgactcactataggcactgttaggcaggaagcagtcttcacctatttgcctaaatgtcacttcctctgagatgtttataagcatctcagaggaatgtggtccctctttgtcatgtcaccttcagttggatacagatcaggtcag

SEQ ID NO: 1456 - DNA, 150 bp, Artificial Sequence
  Synthetic polynucleotide
ctaatacgactcactataggcactgtgagaaccagctggccaggcctgggcttggcagctggactttcgccttctgcccgtcctgaaatgggcaggtgggctggggccctgggctggggatggtattcagttggatacagatcaggtcag

SEQ ID NO: 1457 - DNA, 150 bp, Artificial Sequence
  Synthetic polynucleotide
ctaatacgactcactataggcactgtgcccccgcggccgtccccatcgcccccgccgcttacctggcgcccgcccggcccccgtttccgggaacgcgccggctcggggctgcggcggagcgggaggtcagttggatacagatcaggtcag

SEQ ID NO: 1458 - DNA, 150 bp, Artificial Sequence
  Synthetic polynucleotide
ctaatacgactcactataggcactgtgatatatatgtgatacatatatatgagatatatatgtgatacatatatatgagatatatatgatacatatatatgagatatatatgatacatatatatgatcagttggatacagatcaggtcag

SEQ ID NO: 1459 - DNA, 150 bp, Artificial Sequence
  Synthetic polynucleotide
ctaatacgactcactataggcactgtctccaaggacctcaaagctcttttcagacacctgatgccaggtgtgatccctactgcaggcagagcacctgagccccaagaaggggagaggtcaggccagtcagttggatacagatcaggtcag

SEQ ID NO: 1460 - DNA, 150 bp, Artificial Sequence
  Synthetic polynucleotide
ctaatacgactcactataggcactgtgaatagggtagaggtgggaggcagggcatggcaccctaaaaatggattgggaggccaggcgcagtggctcacgcctgtaatcccagcactttgggaggcctcagttggatacagatcaggtcag

SEQ ID NO: 1461 - DNA, 150 bp, Artificial Sequence
  Synthetic polynucleotide
ctaatacgactcactataggcactgtgacctggcgggggatggagcccccaggggctgggggagtaggtggggtcctcactgcaaaatgatgctgtctgggtcagcccagaggaagaaagcaagaatcagttggatacagatcaggtcag

SEQ ID NO: 1462 - DNA, 150 bp, Artificial Sequence
  Synthetic polynucleotide
ctaatacgactcactataggcactgtctaagggacagattgcctcttcaagtgggcccctgacccctgtgcctcctgactgggagacacctcccagcaggggtcgacagacacctcacacaggagatcagttggatacagatcaggtcag

SEQ ID NO: 1463 - DNA, 150 bp, Artificial Sequence
  Synthetic polynucleotide
ctaatacgactcactataggcactgtttgagacagagtctcgctctgtcgcccaggctggagtgcagtgcacaatcttggctcactgcaagctccgcctcccaggttcacaccattctcctgcctctcagttggatacagatcaggtcag

SEQ ID NO: 1464 - DNA, 150 bp, Artificial Sequence
  Synthetic polynucleotide
ctaatacgactcactataggcactgtcaggtgcccgcagtgcccaggggcggcgaggggcggggccagagtaggggctggctggatgagggcggggctccggcccgggtgggccgaagtctgaccctcagttggatacagatcaggtcag

SEQ ID NO: 1465 - DNA, 150 bp, Artificial Sequence
  Synthetic polynucleotide
ctaatacgactcactataggcactgtctccaggacggggcggctggccgggcagagcggctcctcacttcccagtaggggcggccaggcagaggcgcccctcacctcccggacggggcggctggcctcagttggatacagatcaggtcag

SEQ ID NO: 1466 - DNA, 150 bp, Artificial Sequence
  Synthetic polynucleotide
ctaatacgactcactataggcactgtgcctgggaggtgggagcactgggggtggggcgagaaggggaaggcgcccggcccacttggtgggcggggcggggggcggggtggcgggaaggaggaatgctcagttggatacagatcaggtcag

SEQ ID NO: 1467 - DNA, 150 bp, Artificial Sequence
  Synthetic polynucleotide
ctaatacgactcactataggcactgtctccctcccagatggggcggctggccgggcagaggggctcctcacttcccagtaggggcggccgggcagaggcgcccctcaaccagtgagtcttaagctgtcagttggatacagatcaggtcag

SEQ ID NO: 1468 - DNA, 150 bp, Artificial Sequence
  Synthetic polynucleotide
ctaatacgactcactataggcactgtggggtgaggaggctgactttccgcggcctcagcatcctgtctcccatggagagaccccatttcctgcctcgggggcccgaagaagcctgcagagggagaatcagttggatacagatcaggtcag

SEQ ID NO: 1469 - DNA, 150 bp, Artificial Sequence
  Synthetic polynucleotide
ctaatacgactcactataggcactgtccgcgcaggcaagaggctgccgcccccagcgagggagagagcagcggcgaccccacccagtcaccggacgccgccccgcagtgccctgcgggtgcgaacctcagttggatacagatcaggtcag

SEQ ID NO: 1470 - DNA, 150 bp, Artificial Sequence
  Synthetic polynucleotide
ctaatacgactcactataggcactgtatacctagaaaatgcagcgtgcaccagaacagctgcattatagttcagaatcttggctgtggacggtttctcacacagccaattctaatcacttaatccttcagttggatacagatcaggtcag

SEQ ID NO: 1471 - DNA, 150 bp, Artificial Sequence
  Synthetic polynucleotide
ctaatacgactcactataggcactgtggggtcagcccccgccaggccagccgccccatccgggagggaggtggggggtcagccccccgcccggccagccgccccgtccgggagggaggtaggggggtcagttggatacagatcaggtcag

SEQ ID NO: 1472 - DNA, 150 bp, Artificial Sequence
  Synthetic polynucleotide
ctaatacgactcactataggcactgttccctgaccagcctccgaccctccatcccctttatcccagcccttccgcttggaaatggggatgagtgacctgggggcgcctttaggggcgcgccatctgtcagttggatacagatcaggtcag

SEQ ID NO: 1473 - DNA, 150 bp, Artificial Sequence
  Synthetic polynucleotide
ctaatacgactcactataggcactgttgaccacctgagccccataggatgaggatctgcaccagggtgcgggtgccctcagtgactgggctcatctttctgctggagaaagtgggcacaaggcccatcagttggatacagatcaggtcag

SEQ ID NO: 1474 - DNA, 150 bp, Artificial Sequence
  Synthetic polynucleotide
ctaatacgactcactataggcactgtccccggccgagaaagtgcgcggggcccggctcagccgccacacgtcggggcttctgagcccgctgggcacttaaggcgctcctccctcgtcccggggctgtcagttggatacagatcaggtcag

SEQ ID NO: 1475 - DNA, 150 bp, Artificial Sequence
  Synthetic polynucleotide
ctaatacgactcactataggcactgtcgtccggccccttccgcgcctccgacatgcccgcggctctggccggccggggcccggtctgagcaggatccggctccaggctccgccgcgccgcctttcctcagttggatacagatcaggtcag

SEQ ID NO: 1476 - DNA, 150 bp, Artificial Sequence
  Synthetic polynucleotide
ctaatacgactcactataggcactgtaatcgaaaaatagtaggcagcccgcccgcccggccgaccggcggcaagccccacgcgcggcgggtgaagggcgggcccggagtagggcctccggggcccctcagttggatacagatcaggtcag

SEQ ID NO: 1477 - DNA, 150 bp, Artificial Sequence
  Synthetic polynucleotide
ctaatacgactcactataggcactgtggacagcgcccctcagcccgatactcaccatgcgcgggggccgcgcagcacagccagagcgccagcagcgcccacagcagagcggggcgcagggcgggcatcagttggatacagatcaggtcag

SEQ ID NO: 1478 - DNA, 150 bp, Artificial Sequence
  Synthetic polynucleotide
ctaatacgactcactataggcactgtgtgaggaggccgcaaccgctgggagcacgtggttgccacgtggttgggggagggaggggggtgtgggcgctacatccgggactcaccggcgtgttgccactcagttggatacagatcaggtcag

SEQ ID NO: 1479 - DNA, 150 bp, Artificial Sequence
  Synthetic polynucleotide
ctaatacgactcactataggcactgttataaataaaaaatatatatacaatatatattatagctgggtgtggtggcgcatgcctgtagtcccagctaattgggagactgaggtgggaggatcaccttcagttggatacagatcaggtcag

SEQ ID NO: 1480 - DNA, 150 bp, Artificial Sequence
  Synthetic polynucleotide
ctaatacgactcactataggcactgtcagccgccccgtctgggaggtgaggggcgcctctgcccggccgcccctactgggaagtgaggagcccctcagcccggccagccaccccgtccgggagggatcagttggatacagatcaggtcag

SEQ ID NO: 1481 - DNA, 150 bp, Artificial Sequence
  Synthetic polynucleotide
ctaatacgactcactataggcactgtccctcatagaggagagctgacctctctgctcagccctggctcaggaaatgctctgaaagccagggctgacagtgcacttctcaccaggctagcgccacactcagttggatacagatcaggtcag

SEQ ID NO: 1482 - DNA, 150 bp, Artificial Sequence
  Synthetic polynucleotide
ctaatacgactcactataggcactgtcgaggactcccggccggtgggcgggagctaggcccacggggcgcccggaccgcggggccgaggaggaagggaccggcctccccgcagggacctcggcctctcagttggatacagatcaggtcag

SEQ ID NO: 1483 - DNA, 150 bp, Artificial Sequence
  Synthetic polynucleotide
ctaatacgactcactataggcactgtgttggccaggctggtctcgaactcctggcctcaggtgatttgcccacctatagacctcccaaagtggtgggattacaggcgtgagccactgtgcctggtctcagttggatacagatcaggtcag

SEQ ID NO: 1484 - DNA, 150 bp, Artificial Sequence
  Synthetic polynucleotide
ctaatacgactcactataggcactgtctactcaggagactgaggtgggaggatcacttgaacccaggaggttggggctgcagtgagccatgattgtgccactgcactccagcctgggcagcagagttcagttggatacagatcaggtcag

SEQ ID NO: 1485 - DNA, 150 bp, Artificial Sequence
  Synthetic polynucleotide
ctaatacgactcactataggcactgtgggtttcaccatgttggtcaggctggtcttgaactcctgacctcaaacaatccacccgccttggcctcccaaagtgctgggattacaggcgtgagccacttcagttggatacagatcaggtcag

SEQ ID NO: 1486 - DNA, 150 bp, Artificial Sequence
  Synthetic polynucleotide
ctaatacgactcactataggcactgttcgtccctggaagagtcagactttttgcccgaggagccgttcttggccgcggccgctgcggctgccgctgcgcgctcctgcttgcgaaacttggcgcggctcagttggatacagatcaggtcag

SEQ ID NO: 1487 - DNA, 150 bp, Artificial Sequence
  Synthetic polynucleotide
ctaatacgactcactataggcactgtctgtggcccaggctggagtacagtcaagtgtaagcgattctcctgcctcagcctccctagtagctgggactacaggcacatgccactgcgcccagcttattcagttggatacagatcaggtcag

SEQ ID NO: 1488 - DNA, 150 bp, Artificial Sequence
  Synthetic polynucleotide
ctaatacgactcactataggcactgttacatgtagatacatgtatacatatatacatgtagatacatgtagatacatgtatacatatatacatgtagatacatgtagatacatgtatacatatatatcagttggatacagatcaggtcag

SEQ ID NO: 1489 - DNA, 150 bp, Artificial Sequence
  Synthetic polynucleotide
ctaatacgactcactataggcactgtacacagtcccaagcacgcacgtgcatgcacagacacctgtcacatgggctggtcgcacagcccatgtggccatgcacgtagtctcccatatacctgtgcttcagttggatacagatcaggtcag

SEQ ID NO: 1490 - DNA, 150 bp, Artificial Sequence
  Synthetic polynucleotide
ctaatacgactcactataggcactgtcctccggcgccaggtcctggatggacggcagctggcgctgaaggtgagcgccaactccgtatacggcttcactggcgcccaggtgggcaagttgccgtgctcagttggatacagatcaggtcag

SEQ ID NO: 1491 - DNA, 150 bp, Artificial Sequence
  Synthetic polynucleotide
ctaatacgactcactataggcactgtgtccaccccgcagggcctggcccgggtcccgccgctctcatcgcccccgccgcgcggcaggtcccaaacgcagctgcgcggaaggcgaggcccgaaaaactcagttggatacagatcaggtcag

SEQ ID NO: 1492 - DNA, 150 bp, Artificial Sequence
  Synthetic polynucleotide
ctaatacgactcactataggcactgtcactatggctggatgtcagagagaagcagcttgacttcagagggacagcttgatggtgtaacctgggagaagaatctggccagagagggccagacttcaatcagttggatacagatcaggtcag

SEQ ID NO: 1493 - DNA, 150 bp, Artificial Sequence
  Synthetic polynucleotide
ctaatacgactcactataggcactgtccaaagttttgggattacaggcgtgagccactgcctccggccaggaaactcttctttaaaaaagattttcagccgggcacggtggcttatgcctgtaatctcagttggatacagatcaggtcag

SEQ ID NO: 1494 - DNA, 150 bp, Artificial Sequence
  Synthetic polynucleotide
ctaatacgactcactataggcactgttggcggcggcctctgaatggcctcttggggatgtggggcgcgcatgacttgctccaagtaggggagggccgccgggtgggtcgggacctgggaaggtttttcagttggatacagatcaggtcag

SEQ ID NO: 1495 - DNA, 150 bp, Artificial Sequence
  Synthetic polynucleotide
ctaatacgactcactataggcactgtcctggagaaaggaagggccggccggcgggcgccccacagccggaaggggcgagcccgcaaatagggctcaccttcaggtcgttctctggcaggtacttgctcagttggatacagatcaggtcag

SEQ ID NO: 1496 - DNA, 150 bp, Artificial Sequence
  Synthetic polynucleotide
ctaatacgactcactataggcactgtgcacagtggcatttttgtggaactcgtattccagctgtgcgtctcagaagaagcgcacagctccctcctggctttcttaacatagtgagccacttccacttcagttggatacagatcaggtcag

SEQ ID NO: 1497 - DNA, 150 bp, Artificial Sequence
  Synthetic polynucleotide
ctaatacgactcactataggcactgtgcgcggtgacccccgcggggatttgttggtgccccgagactcactgagttgcgggggccttggagacctccaggtctgaaaagttagctctagagaagagtcagttggatacagatcaggtcag

SEQ ID NO: 1498 - DNA, 150 bp, Artificial Sequence
  Synthetic polynucleotide
ctaatacgactcactataggcactgtggccccgtagggggaggggccaggcgatgatggacaaggccagggctggcagcgcagggccaagatcggggtcacagcccgggcactcaccgctctcctgtcagttggatacagatcaggtcag

SEQ ID NO: 1499 - DNA, 150 bp, Artificial Sequence
  Synthetic polynucleotide
ctaatacgactcactataggcactgtgaaatctagggggaggttcccaaacctcagttcttgacttctgtgcacccacaggcccagcaccacttgtaagccaccagggcttggggcttgcactctctcagttggatacagatcaggtcag

SEQ ID NO: 1500 - DNA, 150 bp, Artificial Sequence
  Synthetic polynucleotide
ctaatacgactcactataggcactgtggcgcaggtagtgcgcaggcgctcgcgcggggttctgcaacgcgcatgcgccggaagcaagcttccccgcccccaccagctgctggcagtgccatctgtttcagttggatacagatcaggtcag

SEQ ID NO: 1501 - DNA, 150 bp, Artificial Sequence
  Synthetic polynucleotide
ctaatacgactcactataggcactgtcagcaaatattgcagaacagcaaatattgctgccggagccttcctctggaagcttcgtcttgggggcacccggctgtatgaggtgtcagtcggcccctactcagttggatacagatcaggtcag

SEQ ID NO: 1502 - DNA, 150 bp, Artificial Sequence
  Synthetic polynucleotide
ctaatacgactcactataggcactgtagggcggagcggctaccttccggcagggcgcggccagccgcaggccgtgggacaggctctgggccctgtggtagttcacaagctcgggcaggctgaggaatcagttggatacagatcaggtcag

SEQ ID NO: 1503 - DNA, 150 bp, Artificial Sequence
  Synthetic polynucleotide
ctaatacgactcactataggcactgttacaggtatgagccacagtgcccggcgggataagttttaaaataatattctctgctggctgggcatggtggctcatgcctgtaaacccagcactttgggatcagttggatacagatcaggtcag

SEQ ID NO: 1504 - DNA, 150 bp, Artificial Sequence
  Synthetic polynucleotide
ctaatacgactcactataggcactgtgaggctgagccaggagaattgccgggggatggaggttgcagtgagccgagattgtgccactgcactccagcctgggcgacagagccagactctgcctcaatcagttggatacagatcaggtcag

SEQ ID NO: 1505 - DNA, 150 bp, Artificial Sequence
  Synthetic polynucleotide
ctaatacgactcactataggcactgtcaagagaattgcttgaaccagggaggcagaggttgcagtgagccgagatggcaccactgcactccagtctgggcaacagagtaagactctgtctcaaaaatcagttggatacagatcaggtcag

SEQ ID NO: 1506 - DNA, 150 bp, Artificial Sequence
  Synthetic polynucleotide
ctaatacgactcactataggcactgtcatcccagcctccaaaatgctgggattacaggcgtgtgccaccacgcctggctaatctttaaaagttttttgtagaaatggggtctcactgtgttgtccatcagttggatacagatcaggtcag

SEQ ID NO: 1507 - DNA, 150 bp, Artificial Sequence
  Synthetic polynucleotide
ctaatacgactcactataggcactgttttactgcccaagctggtctcaaactcctggcctcaagtggttttcctgcttgggcctcccaaagtactggattacaagtgtgagccaccacaccagccttcagttggatacagatcaggtcag

SEQ ID NO: 1508 - DNA, 150 bp, Artificial Sequence
  Synthetic polynucleotide
ctaatacgactcactataggcactgttctggagagggctgaggcggcagggggctggcgtgtcagcgctgccttgagcgtgcgcacatctggctgggctgcagcagcacccaggctcagccctgactcagttggatacagatcaggtcag

SEQ ID NO: 1509 - DNA, 150 bp, Artificial Sequence
  Synthetic polynucleotide
ctaatacgactcactataggcactgtcggcccttctaggcagaaaggcggcagcaggatgggaagccaaccagcagggcactgggcctcctggcaggctcagcacctgctggcgcctggcttccactcagttggatacagatcaggtcag

SEQ ID NO: 1510 - DNA, 150 bp, Artificial Sequence
  Synthetic polynucleotide
ctaatacgactcactataggcactgtagacaagagtctcactctgtcacctaggctggagtgcagtgatgcgatctcggctcactgcaacctctgcctcccaggttcaagcaattctcctgcctcatcagttggatacagatcaggtcag

SEQ ID NO: 1511 - DNA, 150 bp, Artificial Sequence
  Synthetic polynucleotide
ctaatacgactcactataggcactgtggtcacactgaggggcagtggaggagtcaggctgcaagcccagggctatctggcttgagagccccagctctgtcattggtgacaacaccattgacaccaatcagttggatacagatcaggtcag

SEQ ID NO: 1512 - DNA, 150 bp, Artificial Sequence
  Synthetic polynucleotide
ctaatacgactcactataggcactgtgtggccccagtgactcagccactatggctactagaaaagccaggctggcaagtgactttcagtggtcactcaggaccccttcctgcagatacaaacaaagtcagttggatacagatcaggtcag

SEQ ID NO: 1513 - DNA, 150 bp, Artificial Sequence
  Synthetic polynucleotide
ctaatacgactcactataggcactgttgccttagctggtctcaaactcctgggctgaagtgatcctcccacttcagactcccaaagtgcttgagattacaggcatgaaccaccacacctggcctgatcagttggatacagatcaggtcag

SEQ ID NO: 1514 - DNA, 150 bp, Artificial Sequence
  Synthetic polynucleotide
ctaatacgactcactataggcactgtgccgcggggcccgggggagccactccgcgctcctgcaccgtccggctggcagctgcggcgaagcggcgctgattccttgcatgaggccggacggcgtccgtcagttggatacagatcaggtcag

SEQ ID NO: 1515 - DNA, 150 bp, Artificial Sequence
  Synthetic polynucleotide
ctaatacgactcactataggcactgttgctggaagccgggccaaacgcagtctttgcatgagtgtggccctggctgtgggagccgaagcacagccaccacgcgcgccggagcgcagggagagtcgctcagttggatacagatcaggtcag

SEQ ID NO: 1516 - DNA, 150 bp, Artificial Sequence
  Synthetic polynucleotide
ctaatacgactcactataggcactgtccaggcgtggtgactcacgcctgtaatcccagcactttgggaggctgaggcgggtggatcacgaggtcaggagatcgagaccagcctggctaacgaggtgtcagttggatacagatcaggtcag

SEQ ID NO: 1517 - DNA, 150 bp, Artificial Sequence
  Synthetic polynucleotide
ctaatacgactcactataggcactgttccacgttggtcaggctggtctcgaactcctgacctcgtgatccacccaccttggcctcccaaagtgctgggattacaggcgtgagccaccgcaccaggctcagttggatacagatcaggtcag

SEQ ID NO: 1518 - DNA, 150 bp, Artificial Sequence
  Synthetic polynucleotide
ctaatacgactcactataggcactgtcccaaggtctcacagcccctgtggctgagaggggcttggaacctgggcagttggctgcccctgtgagcagtgagtccttagaaggacttactgtcagtattcagttggatacagatcaggtcag

SEQ ID NO: 1519 - DNA, 150 bp, Artificial Sequence
  Synthetic polynucleotide
ctaatacgactcactataggcactgtttcgccgccccgcacaggctgccagcgggcgcggcgcgctggggcgtcagtccgggcactcggtaccggttaacttcaggatttcgcttccctcgccgcttcagttggatacagatcaggtcag

SEQ ID NO: 1520 - DNA, 150 bp, Artificial Sequence
  Synthetic polynucleotide
ctaatacgactcactataggcactgtttcattcttgtgaaggtgctcgcaggcgggcagcgaccacaggaagcggcccagccgctcgatgttgccgccctgctgcagcacctcgcacacgcacgcctcagttggatacagatcaggtcag

SEQ ID NO: 1521 - DNA, 150 bp, Artificial Sequence
  Synthetic polynucleotide
ctaatacgactcactataggcactgttatatatattatgtataatatatattatatattatacataatatatattatatattatatattatgtataatatatgttatatatataatatatattatgtcagttggatacagatcaggtcag

SEQ ID NO: 1522 - DNA, 150 bp, Artificial Sequence
  Synthetic polynucleotide
ctaatacgactcactataggcactgtcaagtgtgcacgagggggaggcacacccaggccgagtggaacaccaccctaagggggtggtgacaggtggcactgggagtggctggagtcggggttcacctcagttggatacagatcaggtcag

SEQ ID NO: 1523 - DNA, 150 bp, Artificial Sequence
  Synthetic polynucleotide
ctaatacgactcactataggcactgttactcaggaggctgaggcaggagaatcgcttgaacccgggaggtggaggttgcagtgagctgagatcacgccattgcactccagcctgggcaacgagcgatcagttggatacagatcaggtcag

SEQ ID NO: 1524 - DNA, 150 bp, Artificial Sequence
  Synthetic polynucleotide
ctaatacgactcactataggcactgttctacttcctcactgtgcagtgccctgcaagggccaccagagccctcgggcacatcccagcatggcccaggtccttgggcatggtgggatccggacaccctcagttggatacagatcaggtcag

SEQ ID NO: 1525 - DNA, 150 bp, Artificial Sequence
  Synthetic polynucleotide
ctaatacgactcactataggcactgttgtgacctgccccccagcagccctgccagtcacatggttctgcttcacagacagggcagcccagagaggaggctggggggctggtgtctgatgcctcccttcagttggatacagatcaggtcag

SEQ ID NO: 1526 - DNA, 150 bp, Artificial Sequence
  Synthetic polynucleotide
ctaatacgactcactataggcactgtaggctgaggcaggagaatcgcttgaacctgggaggtagaggctgcagtgagccgagattgcgccactgcactcccagcctggctgacagagtgagactcctcagttggatacagatcaggtcag

SEQ ID NO: 1527 - DNA, 150 bp, Artificial Sequence
  Synthetic polynucleotide
ctaatacgactcactataggcactgtttggactgagcccagcatgagttcaccccagccccagctgggtgaactttgaggcccagtggggcagactctctcctccccactgctgctgcgggactggtcagttggatacagatcaggtcag

SEQ ID NO: 1528 - DNA, 150 bp, Artificial Sequence
  Synthetic polynucleotide
ctaatacgactcactataggcactgtagtcgaagctctcgcggctgccatccaggtgaaagcggccggcctgaaagtgcacgcggatgctcgtgggtcccgaggccatcttcacgctaagggcgaatcagttggatacagatcaggtcag

SEQ ID NO: 1529 - DNA, 150 bp, Artificial Sequence
  Synthetic polynucleotide
ctaatacgactcactataggcactgttcggtgggagatgcgctgggcggcggggtcgcgtccttgcgcgcagtgcccggcccggagcagccgggacccgagcccgcccgacagccgggtccggcgctcagttggatacagatcaggtcag

SEQ ID NO: 1530 - DNA, 150 bp, Artificial Sequence
  Synthetic polynucleotide
ctaatacgactcactataggcactgttactcgggaggctgaggcaggagaactgcttgaacctgggaggcggaggttgcagtgagccgagattgtgccactgcactccagcctgggcaacagaatgtcagttggatacagatcaggtcag

SEQ ID NO: 1531 - DNA, 150 bp, Artificial Sequence
  Synthetic polynucleotide
ctaatacgactcactataggcactgtcaactcctcggacaccgtcacctccccgcagagggcgggcccgctggccggtcagtgcgcgggcggcgcggggtcctcgcccacctggggccacggcgggtcagttggatacagatcaggtcag

SEQ ID NO: 1532 - DNA, 150 bp, Artificial Sequence
  Synthetic polynucleotide
ctaatacgactcactataggcactgttcgcgcttgtcgtgaaagcgaacgaaggcgaagccgcgggactccttggtgtagcggtcccgcgggatgtacacgtcgccgacgcgcccgtacttctcgatcagttggatacagatcaggtcag

SEQ ID NO: 1533 - DNA, 150 bp, Artificial Sequence
  Synthetic polynucleotide
ctaatacgactcactataggcactgtgtctctactaaaaatagaaaaattagctgggagtgggggtgtgcacctctagtcccagcaactcaggtatgagaatggctcgaaccttggaggcagagggtcagttggatacagatcaggtcag

SEQ ID NO: 1534 - DNA, 150 bp, Artificial Sequence
  Synthetic polynucleotide
ctaatacgactcactataggcactgtagcctcaccaacatggggaaaccctgtctttaatgaaattacaaaaatagctgggcgtggtggcacgcctgtaatcccagctactcaggaggctgagacatcagttggatacagatcaggtcag

SEQ ID NO: 1535 - DNA, 150 bp, Artificial Sequence
  Synthetic polynucleotide
ctaatacgactcactataggcactgtgctggtctggaaggcacctgcggctccccccacgcaggcaggagctgccccaagctcctgggcatggcaaacaggcagcagtcacctggtcaccagggcttcagttggatacagatcaggtcag

SEQ ID NO: 1536 - DNA, 150 bp, Artificial Sequence
  Synthetic polynucleotide
ctaatacgactcactataggcactgtgcagacaggagtgtggggtggggcaagggcccagtggcggctgtgcccgctgatgcagagctggggcaccttgtccacagggtctgccccaccagagacgtcagttggatacagatcaggtcag

SEQ ID NO: 1537 - DNA, 150 bp, Artificial Sequence
  Synthetic polynucleotide
ctaatacgactcactataggcactgtgctgttttctggcttttgtctggcctgtggagtgggggtgggagggaagggatgcagacaggactgcttccccgtccctgcctcctccactgccatcgtgtcagttggatacagatcaggtcag

SEQ ID NO: 1538 - DNA, 150 bp, Artificial Sequence
  Synthetic polynucleotide
ctaatacgactcactataggcactgtgaactgcagactcaattctgctgggatgtggccatcccttagggctctgtctcaagaagaaggggagccatgttgaagtcaacagtaaaagcttatttcctcagttggatacagatcaggtcag

SEQ ID NO: 1539 - DNA, 150 bp, Artificial Sequence
  Synthetic polynucleotide
ctaatacgactcactataggcactgtcagggggccctgggccaggtgcgcggcggccgcgtccgtctgcaccgtgagcggcgcgaaggcctccttgcccgggagcgcgcgcgcctcttccaccttgtcagttggatacagatcaggtcag

SEQ ID NO: 1540 - DNA, 150 bp, Artificial Sequence
  Synthetic polynucleotide
ctaatacgactcactataggcactgtcaccgcagccacaggggtggggtgcaggagccgtggggcaaggtccaggatcctcagagcccggtgggctcctggcagtcgtggcctggtccccgggccctcagttggatacagatcaggtcag

SEQ ID NO: 1541 - DNA, 150 bp, Artificial Sequence
  Synthetic polynucleotide
ctaatacgactcactataggcactgttttgagacagagtctcgctctgttgcccaggctagggtgcaatggtgcaacctcagctcactgcaacctctgtctcccgggttcaagtgattctcatgcctcagttggatacagatcaggtcag

SEQ ID NO: 1542 - DNA, 150 bp, Artificial Sequence
  Synthetic polynucleotide
ctaatacgactcactataggcactgtggctgaggcaggagaatggcgtgaacctgggaggcggagtttgcagtgagccgagatcgcgccactgcactccagcctaggcgacagagtgagactctgttcagttggatacagatcaggtcag

SEQ ID NO: 1543 - DNA, 150 bp, Artificial Sequence
  Synthetic polynucleotide
ctaatacgactcactataggcactgtgcacggactcctggggacaggacggggacgagcaagtgcagaaaagccggctgcgtgtattttgggactccagaaaacaagggcttttgcacactgtgtttcagttggatacagatcaggtcag

SEQ ID NO: 1544 - DNA, 150 bp, Artificial Sequence
  Synthetic polynucleotide
ctaatacgactcactataggcactgttgctccctgcggccaggcaggactgcacctgcgggacagggctgacggcacacctgggggcagggcctgagcctacagggaggcacagggcaggtgggcttcagttggatacagatcaggtcag

SEQ ID NO: 1545 - DNA, 150 bp, Artificial Sequence
  Synthetic polynucleotide
ctaatacgactcactataggcactgtcagctactcagtgggctgaggcaggagaatcgcttgaacccagaaggcggaggttgcagtgagccgagatcccgccactgcactccagcctgggtgacagtcagttggatacagatcaggtcag

SEQ ID NO: 1546 - DNA, 150 bp, Artificial Sequence
  Synthetic polynucleotide
ctaatacgactcactataggcactgtctgctgctttccgaagcctgcccaagcagatgtaggctctccttgccagtgcaaggagaggccctttccagatttaagaacctgttgatttttgacattctcagttggatacagatcaggtcag

SEQ ID NO: 1547 - DNA, 150 bp, Artificial Sequence
  Synthetic polynucleotide
ctaatacgactcactataggcactgtcccagctgggcctggtgtcccccaccagcaaggccagacaagcagccaggcccggggggcacctggagcccagccgtcgctccctgccagcattcctggctcagttggatacagatcaggtcag

SEQ ID NO: 1548 - DNA, 150 bp, Artificial Sequence
  Synthetic polynucleotide
ctaatacgactcactataggcactgtaaagtagccgggcatggtgactggtgcttgtagtcccaactacccaggaggctgaggtgggaggaccacctgagccagggaggtcaaggctgcagagagctcagttggatacagatcaggtcag

SEQ ID NO: 1549 - DNA, 150 bp, Artificial Sequence
  Synthetic polynucleotide
ctaatacgactcactataggcactgtttccagccctcgtggaggccttgggtccggactgtgaggctgtgggctggaggccgctgctctgaggtgcctggcggagcctggcctcgaggcaggggcttcagttggatacagatcaggtcag

SEQ ID NO: 1550 - DNA, 150 bp, Artificial Sequence
  Synthetic polynucleotide
ctaatacgactcactataggcactgtgccggaagggccaccgctccttcccgccgcgcgcccctcccccgccaccgccgcgccggcccgcctgggcctccccggtcgccctcccaccgcctcaacctcagttggatacagatcaggtcag

SEQ ID NO: 1551 - DNA, 150 bp, Artificial Sequence
  Synthetic polynucleotide
ctaatacgactcactataggcactgtaatcccagctactcgggaggctgaggcaggagagtggcatgaacccgggaggcggaggttgcagtgagccgagatcacggcactgcactccagcctgggctcagttggatacagatcaggtcag

SEQ ID NO: 1552 - DNA, 150 bp, Artificial Sequence
  Synthetic polynucleotide
ctaatacgactcactataggcactgtgttagctaggctggagtgcagtggcgcaatctcggctcactgcaacctccgcctactgggttccagtgattctcttgtctcagcctcccgagtagctgggtcagttggatacagatcaggtcag

SEQ ID NO: 1553 - DNA, 150 bp, Artificial Sequence
  Synthetic polynucleotide
ctaatacgactcactataggcactgtaaacatcctggcctggccggatgacgcctggctgggcggaggaggaccgaagggcccgtagcgacaggctccggctgtgccagtgaactggccggaaaagtcagttggatacagatcaggtcag

SEQ ID NO: 1554 - DNA, 150 bp, Artificial Sequence
  Synthetic polynucleotide
ctaatacgactcactataggcactgttttcccccgagacagagtattgctctgtcaccaggctggagtacagtggcatgatctctgctcactgtaatctctgcctcccgggttcaagacattctcctcagttggatacagatcaggtcag

SEQ ID NO: 1555 - DNA, 150 bp, Artificial Sequence
  Synthetic polynucleotide
ctaatacgactcactataggcactgtgtaggtctggaggctggcaaaggaggccgaacattcgttgcaggtgacctccttgctggcgggctcggaggggggcccggccgacgcggtgctctccgcgtcagttggatacagatcaggtcag

SEQ ID NO: 1556 - DNA, 150 bp, Artificial Sequence
  Synthetic polynucleotide
ctaatacgactcactataggcactgtcaaaacagatcattcaaaatgtgatcatattaagtgctataaagaaataaagcaggccaggcgtggtggctcacgcctgtaatcccagcactttgggaggtcagttggatacagatcaggtcag

SEQ ID NO: 1557 - DNA, 150 bp, Artificial Sequence
  Synthetic polynucleotide
ctaatacgactcactataggcactgtcacgccggatggtgacggcggcgtccggggccccacagtgcgggctcccccgaaaaagtttgagaaagccaactcgccaggccttaacatccctgggatctcagttggatacagatcaggtcag

SEQ ID NO: 1558 - DNA, 150 bp, Artificial Sequence
  Synthetic polynucleotide
ctaatacgactcactataggcactgtgacccaggaacccccagttcctgggaattttttctgagaactcaaaagaaagaagcaatgtgtgcaaaatctttttcaagcagtatggttatagttacactcagttggatacagatcaggtcag

SEQ ID NO: 1559 - DNA, 150 bp, Artificial Sequence
  Synthetic polynucleotide
ctaatacgactcactataggcactgtatataatcatgtctttagctgaaaggggaatgaggagggaaacccaagtagcagggccacctggccacccagatgggttggctgttcccaggtggcaatttcagttggatacagatcaggtcag

SEQ ID NO: 1560 - DNA, 150 bp, Artificial Sequence
  Synthetic polynucleotide
ctaatacgactcactataggcactgttccaggccggggctgcaccagggcagctctccacggggctaggctgcagccaggctggtgcacggccccaggagtactggggcaagcgggcaaggtgagctcagttggatacagatcaggtcag

SEQ ID NO: 1561 - DNA, 150 bp, Artificial Sequence
  Synthetic polynucleotide
ctaatacgactcactataggcactgttttatcatcgactttgggggacatcaagaatcacatgggatcttgatgctgtcgctgaggaagcctggaggcagggtgctggctcgaaagccagcacccttcagttggatacagatcaggtcag

SEQ ID NO: 1562 - DNA, 150 bp, Artificial Sequence
  Synthetic polynucleotide
ctaatacgactcactataggcactgtagctggtggcaagagaggcaccttgctcagccctctcctttgacaggtcaaggctggaaggcccatagtgagtgggctgaggctgggggtgctcaggccgtcagttggatacagatcaggtcag

SEQ ID NO: 1563 - DNA, 150 bp, Artificial Sequence
  Synthetic polynucleotide
ctaatacgactcactataggcactgtactccttgggctcaaggatctgctcacttcagcctcccaaagtgctgggattactggtgtgagccactgcacctagcaccatgtgcttttaacccacacttcagttggatacagatcaggtcag

SEQ ID NO: 1564 - DNA, 150 bp, Artificial Sequence
  Synthetic polynucleotide
ctaatacgactcactataggcactgtcctggcacactctcttcacagccgaagaaggccagttgtatggaccgtgtggtggtggtgggggtggtggcggcggcggcggcggcggcggcggcggcggtcagttggatacagatcaggtcag

SEQ ID NO: 1565 - DNA, 150 bp, Artificial Sequence
  Synthetic polynucleotide
ctaatacgactcactataggcactgtgccgctgggaaaggagctgcaggacggggccgagagcaatgggggtggcggcggcggcggagccggcagcggcggcgggcccggcgcggagccggacctgtcagttggatacagatcaggtcag

SEQ ID NO: 1566 - DNA, 150 bp, Artificial Sequence
  Synthetic polynucleotide
ctaatacgactcactataggcactgtaggtgtgagccaccatacccagcttttttgtctctgtattaggcccataaaaagcatgagtgccatgctttttgcttggctttttacgggcctaatactgtcagttggatacagatcaggtcag

SEQ ID NO: 1567 - DNA, 150 bp, Artificial Sequence
  Synthetic polynucleotide
ctaatacgactcactataggcactgtgaccagtggaatgctgtgccttcagggttctcgggctgccacgccgatggcgagagcggcagcccgtccagcagcagcagcggctctctggccctgggcatcagttggatacagatcaggtcag

SEQ ID NO: 1568 - DNA, 150 bp, Artificial Sequence
  Synthetic polynucleotide
ctaatacgactcactataggcactgtttactctagggccctgtttgccctagagtatcacttgttaaggagaatcacttattctccttaattccttcatatatgtcctataccaagagagtattgctcagttggatacagatcaggtcag

SEQ ID NO: 1569 - DNA, 150 bp, Artificial Sequence
  Synthetic polynucleotide
ctaatacgactcactataggcactgtagaggagaccaccggagtcctgcccagggacagcctttctcacaccatagcagggagctggtgatcacggaggctgcctggagcctgtcagcaggctagatcagttggatacagatcaggtcag

SEQ ID NO: 1570 - DNA, 150 bp, Artificial Sequence
  Synthetic polynucleotide
ctaatacgactcactataggcactgttattcagggaggccctgatggacaagattgaatggctgccacagccccttctggctgggcagccttgctctggcctggacttgccttctggcctctcctgtcagttggatacagatcaggtcag

SEQ ID NO: 1571 - DNA, 150 bp, Artificial Sequence
  Synthetic polynucleotide
ctaatacgactcactataggcactgttccccttttggcgacagggtctaaccctgttgcccaggttactgtgcagtggtgcacccataactcactgcagcctcaacctcccagcctcaggagatcctcagttggatacagatcaggtcag

SEQ ID NO: 1572 - DNA, 150 bp, Artificial Sequence
  Synthetic polynucleotide
ctaatacgactcactataggcactgtctgcagccatggtttgggtggctgcggctgcacccggggctcctgctgcacccagggctcctgcctgctcgtggagcagaaggcaaggttctgtagccgctcagttggatacagatcaggtcag

SEQ ID NO: 1573 - DNA, 150 bp, Artificial Sequence
  Synthetic polynucleotide
ctaatacgactcactataggcactgtgaccccgcagcgaagtttgtcggaggactggggcgggggtggccagcaggcccttcagagggggcagggctggcaccgtctcctgcccaggctgagccggtcagttggatacagatcaggtcag

SEQ ID NO: 1574 - DNA, 150 bp, Artificial Sequence
  Synthetic polynucleotide
ctaatacgactcactataggcactgtaaaaaggagctgggtgtggtggtgggcgcctgcaatcccagctactcgggaggctgaggcaggagaactgcctgaacccaggaggcggaggctgcagtggtcagttggatacagatcaggtcag

SEQ ID NO: 1575 - DNA, 150 bp, Artificial Sequence
  Synthetic polynucleotide
ctaatacgactcactataggcactgttcactggcgcttggccttgtaggggcgagagcgtttccgccggtcaggcttccgctgcttgtggagccggccgatgctgaccccttggcgccgccgcacgtcagttggatacagatcaggtcag

SEQ ID NO: 1576 - DNA, 150 bp, Artificial Sequence
  Synthetic polynucleotide
ctaatacgactcactataggcactgtgggcccccctcacccgctcctcctgggggccccttgaggaagggctcagtctctccgctgcggagcagcagtcgctcaatgtctcgcagcgtctggagggtcagttggatacagatcaggtcag

SEQ ID NO: 1577 - DNA, 150 bp, Artificial Sequence
  Synthetic polynucleotide
ctaatacgactcactataggcactgtccatctgtcttctctggggctccccatctaggaaaagctgcccagtgggggtggggagggctcccctgcacacaccaccttctgctccccattcatggggtcagttggatacagatcaggtcag

SEQ ID NO: 1578 - DNA, 150 bp, Artificial Sequence
  Synthetic polynucleotide
ctaatacgactcactataggcactgtggcgagaccccatcactacaaaaaatttttaaaacaaattatttgtgatggtgtatgcctggtaatcccagctactcaagaggatgaggtgggaggatggtcagttggatacagatcaggtcag

SEQ ID NO: 1579 - DNA, 150 bp, Artificial Sequence
  Synthetic polynucleotide
ctaatacgactcactataggcactgtgacagaatctcgctctgtcacctaggctggagtgcagtggtgccatcttggctcactgcaacctccgtctcctgggttcaagcgattctgttgcctcagctcagttggatacagatcaggtcag

SEQ ID NO: 1580 - DNA, 150 bp, Artificial Sequence
  Synthetic polynucleotide
ctaatacgactcactataggcactgtggtcctgaactcctgccctcaggtgatctgcccgcctcggcctcccaaagtgctgggattacaggcgtaagccacccaccacgcctggccccagctagtttcagttggatacagatcaggtcag

SEQ ID NO: 1581 - DNA, 150 bp, Artificial Sequence
  Synthetic polynucleotide
ctaatacgactcactataggcactgttggggctgggctcagtggctcatgcctgtaatcccagcactttgggaggctgaggcaggcggatcacctgaggtcaggagtttgagaccagcctggccaatcagttggatacagatcaggtcag

SEQ ID NO: 1582 - DNA, 150 bp, Artificial Sequence
  Synthetic polynucleotide
ctaatacgactcactataggcactgtatatatatacacacttgtgtatgtatacataatatacctatatatacaccagtgtatgtatacatatgtatacatatatacacttgtgtgtgttatatattcagttggatacagatcaggtcag

SEQ ID NO: 1583 - DNA, 150 bp, Artificial Sequence
  Synthetic polynucleotide
ctaatacgactcactataggcactgtcccagctctggcccgggcaccacgtgcagcttccacgccggccggggctgggtcgagggaggatggagcagctcctggccagccctcccctttggagacctcagttggatacagatcaggtcag

SEQ ID NO: 1584 - DNA, 150 bp, Artificial Sequence
  Synthetic polynucleotide
ctaatacgactcactataggcactgtttcaccgtgttagccagggtggtctcgatctcctgacctcgtgatccgcccaccttggcctctgggcgaggattacaggcgtgatccacctcacctggcctcagttggatacagatcaggtcag

SEQ ID NO: 1585 - DNA, 150 bp, Artificial Sequence
  Synthetic polynucleotide
ctaatacgactcactataggcactgtgtgtgggtctccacggggaggtggggactggccacagccctcagtgggcaccagggcccacctggcttcaggcgtggggtcctgcccgtcccgccccacctcagttggatacagatcaggtcag

SEQ ID NO: 1586 - DNA, 150 bp, Artificial Sequence
  Synthetic polynucleotide
ctaatacgactcactataggcactgtctcccggacggggcggctggccgggcagaggggtcctcacttcccagtaggggcggccgggcagaggcgcccctcacctcccggacggggcggatggccgtcagttggatacagatcaggtcag

SEQ ID NO: 1587 - DNA, 150 bp, Artificial Sequence
  Synthetic polynucleotide
ctaatacgactcactataggcactgtggtgggcacctgtagtcccagctactcaggaggcggaggttgcagtgagccgagatcttgccactgcactccagcctgggcgacagagcgagactctgtctcagttggatacagatcaggtcag

SEQ ID NO: 1588 - DNA, 150 bp, Artificial Sequence
  Synthetic polynucleotide
ctaatacgactcactataggcactgtcactagtataaaaaatgtggccaggtgtgatggctcacacctgtaatcctggcactttgggaggccgaagtggaaggataacttgaggccaggatttcaatcagttggatacagatcaggtcag

SEQ ID NO: 1589 - DNA, 150 bp, Artificial Sequence
  Synthetic polynucleotide
ctaatacgactcactataggcactgtcatcctcctgttctgcgcggtggtgcctgggacgctgctgctgttcagggtgagccccctcggacctctgagtcagccgggcgagggcctgggccgagggtcagttggatacagatcaggtcag

SEQ ID NO: 1590 - DNA, 150 bp, Artificial Sequence
  Synthetic polynucleotide
ctaatacgactcactataggcactgttgaagccccgtttcctggctatgaaacgtgggctctgccagatccgcgaacaagcactacctgtgggtgccaaggccaggctcagcattccgcttggcattcagttggatacagatcaggtcag

SEQ ID NO: 1591 - DNA, 150 bp, Artificial Sequence
  Synthetic polynucleotide
ctaatacgactcactataggcactgtctgcactcccagctactcaggaggctgaggcacaagaatcgcttgaactgggaggtggaggttgcagtgagctgagattgcgccactgcactccagcctgtcagttggatacagatcaggtcag

SEQ ID NO: 1592 - DNA, 150 bp, Artificial Sequence
  Synthetic polynucleotide
ctaatacgactcactataggcactgtataggtgaccacctgaccaaccttcacaggccagccggcctccaggccgggctgggcaaaaaggttcaccctcaggcacacgggagcctaccgaacccagtcagttggatacagatcaggtcag

SEQ ID NO: 1593 - DNA, 150 bp, Artificial Sequence
  Synthetic polynucleotide
ctaatacgactcactataggcactgtccaggcatcgcgcacgtccagccgcgccccggcccggtgcagcaccaccagcgtgtccaggaagccctcccgggcagcgtcgtgcacgggtcgggtgagatcagttggatacagatcaggtcag

SEQ ID NO: 1594 - DNA, 150 bp, Artificial Sequence
  Synthetic polynucleotide
ctaatacgactcactataggcactgtatggccgagccttgggggaacgagttggcgtccgcagctgccaggggggacctagagcaacttactagtttgttgcaaaataatgtaaacgtcaatgcactcagttggatacagatcaggtcag

SEQ ID NO: 1595 - DNA, 150 bp, Artificial Sequence
  Synthetic polynucleotide
ctaatacgactcactataggcactgtcaccagcggccgcagcgccggcgccccgacgcgctcgtacaggggctccagcctgccgtccaggtagccggcggccgcgcagccgtagccgggcgggggctcagttggatacagatcaggtcag

SEQ ID NO: 1596 - DNA, 150 bp, Artificial Sequence
  Synthetic polynucleotide
ctaatacgactcactataggcactgtcaggacccggacccccacaccctttgggggtggtggaatctggtaagggtccgcctcccaccacggaggaggaggcctccggccccccaggagagccccgtcagttggatacagatcaggtcag

SEQ ID NO: 1597 - DNA, 150 bp, Artificial Sequence
  Synthetic polynucleotide
ctaatacgactcactataggcactgtgccccaacgggggctgggggcgtggccccaggctcagggaacaactcagggggacccagcctcctggtgccactgcctgtgaatcctcccagctccccaatcagttggatacagatcaggtcag

SEQ ID NO: 1598 - DNA, 150 bp, Artificial Sequence
  Synthetic polynucleotide
ctaatacgactcactataggcactgtcgcctttgggcccagcgataccagctgctcccctctcgccaggcattccctgaagacctggagggccctgagccccaggggggcctgctgggccagatgctcagttggatacagatcaggtcag

SEQ ID NO: 1599 - DNA, 150 bp, Artificial Sequence
  Synthetic polynucleotide
ctaatacgactcactataggcactgtccgtctcagcctcctgagtagctgggactacaggcgcgtgccaccacgcctggctaatttttgtatttttagtagagatggggtttccccatctttactatcagttggatacagatcaggtcag

SEQ ID NO: 1600 - DNA, 150 bp, Artificial Sequence
  Synthetic polynucleotide
ctaatacgactcactataggcactgtttggctcttggccagcccagggctctgcaggatgaaatgccaggaaagagccctaatggcctcctctgcccacacagctggggtcctttgaccccctgggtcagttggatacagatcaggtcag

SEQ ID NO: 1601 - DNA, 150 bp, Artificial Sequence
  Synthetic polynucleotide
ctaatacgactcactataggcactgtggatggctggaaggacttacagcctgcgcgcagctcaacctggtccaggatctgcaggctgttgccccagttcaggcagcaggagagaaaggcctgagtgtcagttggatacagatcaggtcag

SEQ ID NO: 1602 - DNA, 150 bp, Artificial Sequence
  Synthetic polynucleotide
ctaatacgactcactataggcactgttggaaaacagtttttccatgaatgggttgtgggaatggtttctggatgacaccattccacctcagataatcaggcattagattctcatagggagcgtgcatcagttggatacagatcaggtcag

SEQ ID NO: 1603 - DNA, 150 bp, Artificial Sequence
  Synthetic polynucleotide
ctaatacgactcactataggcactgtgcctccgcgaccgccaccgccgcgcccgcggcccccgaggacgccgctacctcagccgccgccgcgccgggggagggccccgcggccccgagctccgcgctcagttggatacagatcaggtcag

SEQ ID NO: 1604 - DNA, 150 bp, Artificial Sequence
  Synthetic polynucleotide
ctaatacgactcactataggcactgtagaggaggtcggccactgacaggtgcagcctgtacttgtccgtcatgcttctcagtttcttctggtaacccatgaccaggatgaccaatccattgcccactcagttggatacagatcaggtcag

SEQ ID NO: 1605 - DNA, 150 bp, Artificial Sequence
  Synthetic polynucleotide
ctaatacgactcactataggcactgtgcgatcatgagccacttgaagacttgtggcttattggtgtcctctgtccacagcccatggtcacgtgtggatcctgtttcataggacaccaatattaaggtcagttggatacagatcaggtcag

SEQ ID NO: 1606 - DNA, 150 bp, Artificial Sequence
  Synthetic polynucleotide
ctaatacgactcactataggcactgtagccgggctggagaagggatgcagagggagctggtcaccaggccatggctgggagagtccaccctcgtggaggaatcagcaactggggccaaggaagccatcagttggatacagatcaggtcag

SEQ ID NO: 1607 - DNA, 150 bp, Artificial Sequence
  Synthetic polynucleotide
ctaatacgactcactataggcactgtacctccccctaggtccctcccacaacatgtgggaactctgggagatacaattcaagttgagacttggtggggacacagccaaaccatatcagatggtgaatcagttggatacagatcaggtcag

SEQ ID NO: 1608 - DNA, 150 bp, Artificial Sequence
  Synthetic polynucleotide
ctaatacgactcactataggcactgtagccaggcacagccacagcttgggggagctctggcatcccgaggaaccacagcacccttggggctggcctaagacgggaaggggctgaggccagcctgattcagttggatacagatcaggtcag

SEQ ID NO: 1609 - DNA, 150 bp, Artificial Sequence
  Synthetic polynucleotide
ctaatacgactcactataggcactgttattgttagtagagacagggtttcaccatattggtcaggctggtcttgaactcctgacctcaggtgatccacccacctcagcctcccaaagtgctgggattcagttggatacagatcaggtcag

SEQ ID NO: 1610 - DNA, 150 bp, Artificial Sequence
  Synthetic polynucleotide
ctaatacgactcactataggcactgtcgggccctgtgggacgccctgggcagaggactccctgcaggggctccggagcaggcccgggccccaggggcggtgtcacgggccagggcgccgtaggacatcagttggatacagatcaggtcag

SEQ ID NO: 1611 - DNA, 150 bp, Artificial Sequence
  Synthetic polynucleotide
ctaatacgactcactataggcactgtggtgaggccccgggctcccagcagggggcgcctgctcgcgatcaggtggcggcctgggggcggcctggcggtcccggcggaccctgacgcggcggggctctcagttggatacagatcaggtcag

SEQ ID NO: 1612 - DNA, 150 bp, Artificial Sequence
  Synthetic polynucleotide
ctaatacgactcactataggcactgtgggccaggcgcagtggctcatgcccgtaatcccaacactttgggaggctgaggcaggaggactgcttgagcctaggagtttgagaccagcctgggcaacatcagttggatacagatcaggtcag

SEQ ID NO: 1613 - DNA, 150 bp, Artificial Sequence
  Synthetic polynucleotide
ctaatacgactcactataggcactgttcaggagccaggaggggctcgagctgcgaggccctggaatgaggcaggcatgggctgaggctggagggaaagccccgctaaggctgggcgggggcgggaatcagttggatacagatcaggtcag

SEQ ID NO: 1614 - DNA, 150 bp, Artificial Sequence
  Synthetic polynucleotide
ctaatacgactcactataggcactgtgtgacagatcatcaggcattagattctcataggagcatgcaacctagatccctcacatgtacagttcacaataggatttgtgctcctatgagaatctaattcagttggatacagatcaggtcag

SEQ ID NO: 1615 - DNA, 150 bp, Artificial Sequence
  Synthetic polynucleotide
ctaatacgactcactataggcactgtatggccgagaatgtggtggaaccggggccgccttcagccaagcggcctaaactctcatctccggccctctcggcgtccgccagcgatggcacaggttagttcagttggatacagatcaggtcag

SEQ ID NO: 1616 - DNA, 150 bp, Artificial Sequence
  Synthetic polynucleotide
ctaatacgactcactataggcactgtcttcaccgtgccccaggcagctgccccgggcagcaccacccccagtgccaccagcagcagcagcagctgctccacggtgagcagccctcttatggcgaggtcagttggatacagatcaggtcag

SEQ ID NO: 1617 - DNA, 150 bp, Artificial Sequence
  Synthetic polynucleotide
ctaatacgactcactataggcactgttgtgggaggcggagcagtgaccggcaggaattctgggcagctcaggcacctgtgggcctgagggtgccctctgcccccacccttccgatctcctgggcaatcagttggatacagatcaggtcag

SEQ ID NO: 1618 - DNA, 150 bp, Artificial Sequence
  Synthetic polynucleotide
ctaatacgactcactataggcactgtactcgggaggctgaggcaggagaatggcgtgaacccaggaggcggagcttgcagtgggccgagatcgcaccactgcactccagtctgggcgacagagcgatcagttggatacagatcaggtcag

SEQ ID NO: 1619 - DNA, 150 bp, Artificial Sequence
  Synthetic polynucleotide
ctaatacgactcactataggcactgtatcaggttcatctcactggggcttgtaggacagtgggggcaggacagtgggtgcagcccactgagcgagagccaaagtagggtgaggtatctcctcaccctcagttggatacagatcaggtcag

SEQ ID NO: 1620 - DNA, 150 bp, Artificial Sequence
  Synthetic polynucleotide
ctaatacgactcactataggcactgtcctggcatgcatgggtgcatgcacacacaggcagagggccagggagaactgtgctgtgtccacagagggcagcctggatcacagagctgaccaagaacggtcagttggatacagatcaggtcag

SEQ ID NO: 1621 - DNA, 150 bp, Artificial Sequence
  Synthetic polynucleotide
ctaatacgactcactataggcactgtggcacacctcccagacggggtggtggccgggcagagcggctcctcacttcccagtaggggcggccgggcagaggcgcccctcacctcccggacggggcggtcagttggatacagatcaggtcag

SEQ ID NO: 1622 - DNA, 150 bp, Artificial Sequence
  Synthetic polynucleotide
ctaatacgactcactataggcactgttccagcacgtgtgtcccctttgcaaaggggaaaattacgttttgtaagagaccccaaatcagggtctcttataaaccctggggtaaaactattagaaatgtcagttggatacagatcaggtcag

SEQ ID NO: 1623 - DNA, 150 bp, Artificial Sequence
  Synthetic polynucleotide
ctaatacgactcactataggcactgtgtatattttgataccatatatacggtatcaaaatatacctgtgttgattaggaatagagtgtgtatatatatatatacttgaaagtatatatatatatattcagttggatacagatcaggtcag

SEQ ID NO: 1624 - DNA, 150 bp, Artificial Sequence
  Synthetic polynucleotide
ctaatacgactcactataggcactgtttttttattcttttttgagacagagtctcactctgtcgctgaggctggagtgcagtgatgccatcttggctcactgcaacctctgcatcctgggttcaagtcagttggatacagatcaggtcag

SEQ ID NO: 1625 - DNA, 150 bp, Artificial Sequence
  Synthetic polynucleotide
ctaatacgactcactataggcactgtatacaattttgtactctgttcttttctttaaaaaacagggtctccgtctgccgcccaggctgcagtgcagtggcacgatcacggctttctgcagccttgatcagttggatacagatcaggtcag

SEQ ID NO: 1626 - DNA, 150 bp, Artificial Sequence
  Synthetic polynucleotide
ctaatacgactcactataggcactgtactcgggaggctgaggtgggagaattgcttaagcctgggaggtggaggctgcagtgagccatgattatgccactgcactccatccagcctgggcaacaaatcagttggatacagatcaggtcag

SEQ ID NO: 1627 - DNA, 150 bp, Artificial Sequence
  Synthetic polynucleotide
ctaatacgactcactataggcactgtagaaatcatgctggagatggggtgggagtaggggagggtcttgcctgtgtcccaaggcagccttgggacacaggaccacagtccagtgtagatgctagactcagttggatacagatcaggtcag

SEQ ID NO: 1628 - DNA, 150 bp, Artificial Sequence
  Synthetic polynucleotide
ctaatacgactcactataggcactgtcctgcagagaatgtgacaaaaaagctgacatcgcagagttctaccatgccccatccaggctggcgtgtgcctgctcccaccccagggagctggcacccgctcagttggatacagatcaggtcag

SEQ ID NO: 1629 - DNA, 150 bp, Artificial Sequence
  Synthetic polynucleotide
ctaatacgactcactataggcactgttgggcctcagtgcccctgatgggcgtgtgcctggagggggctggcagtgagctcactgaggggagggctgcttccctcctggggaatgccagcccatccttcagttggatacagatcaggtcag

SEQ ID NO: 1630 - DNA, 150 bp, Artificial Sequence
  Synthetic polynucleotide
ctaatacgactcactataggcactgttatcagccagtagcagtggctcatgcctgtaatcccaacactttgggaggccaaggcaggctggagggcagtggcacaatcttggctcactgcaacctcctcagttggatacagatcaggtcag

SEQ ID NO: 1631 - DNA, 150 bp, Artificial Sequence
  Synthetic polynucleotide
ctaatacgactcactataggcactgtgccccactgtggtccagagtctgggggctggcggcgggcccgggggccggcgcgccctctagctggccggtcttcccgtgcacaccccgatggaggggcgtcagttggatacagatcaggtcag

SEQ ID NO: 1632 - DNA, 150 bp, Artificial Sequence
  Synthetic polynucleotide
ctaatacgactcactataggcactgtcagcgtgagcctcttctccgcgctctcgcggatcgccatggcgatgagcgccacgtacgagtacgggggcttctgcgccgggtccggcttctccggggcttcagttggatacagatcaggtcag

SEQ ID NO: 1633 - DNA, 150 bp, Artificial Sequence
  Synthetic polynucleotide
ctaatacgactcactataggcactgtttaacatttctcacctctattgaggaagccaagaggtgagaaatccaagaatttgggagttgaaaagaaacttaaaagacacagtagtctctttatcttctcagttggatacagatcaggtcag

SEQ ID NO: 1634 - DNA, 150 bp, Artificial Sequence
  Synthetic polynucleotide
ctaatacgactcactataggcactgttctaccaaggcctgggccctgtggtgctgtcagggcctgttagccacctcatgcctttccctggacccctactgggctcacccacgggctccttccccactcagttggatacagatcaggtcag

SEQ ID NO: 1635 - DNA, 150 bp, Artificial Sequence
  Synthetic polynucleotide
ctaatacgactcactataggcactgtccctgcttccaatcctcaccaggagggatggaaacgaaggaggaggggaggaggggcccagggccccaggcgttctggagcaaccaggagggtatttacttcagttggatacagatcaggtcag

SEQ ID NO: 1636 - DNA, 150 bp, Artificial Sequence
  Synthetic polynucleotide
ctaatacgactcactataggcactgtatggaggtgacggcggaccagccgcgctgggtgagccaccaccaccccgccgtgctcaacgggcagcacccggacacgcaccacccgggcctcagccacttcagttggatacagatcaggtcag

SEQ ID NO: 1637 - DNA, 150 bp, Artificial Sequence
  Synthetic polynucleotide
ctaatacgactcactataggcactgtccccaggttggaggcctgggccgtgacagtagtgccctggggctacagtgggattggcaccgcagctcacctggggagggaggggagctgcggcccgtcatcagttggatacagatcaggtcag

SEQ ID NO: 1638 - DNA, 150 bp, Artificial Sequence
  Synthetic polynucleotide
ctaatacgactcactataggcactgtggggggtcagccccccgcccggccagccgccccgtccgggaggtgaggggcgcctctgcccagctgcccctactgggaagtgaggagcccctctgcccggtcagttggatacagatcaggtcag

SEQ ID NO: 1639 - DNA, 150 bp, Artificial Sequence
  Synthetic polynucleotide
ctaatacgactcactataggcactgtggagggggagcccatggggctccggagactgcgacaaaaagagggtttcggggacaggaaaccgggtggcgggtagagggagggggacccgcctccgtggtcagttggatacagatcaggtcag

SEQ ID NO: 1640 - DNA, 150 bp, Artificial Sequence
  Synthetic polynucleotide
ctaatacgactcactataggcactgtgtattattagttggtgcaaaagtaatcgtggtttgtaatggcaaggaccacaaatacttttgcaccaatctaatacatccataaatggatatatttgaattcagttggatacagatcaggtcag

SEQ ID NO: 1641 - DNA, 150 bp, Artificial Sequence
  Synthetic polynucleotide
ctaatacgactcactataggcactgtacaaagagagactccgtctcaaaataaataaataaggaactgccgggcgcggtggctcacgcctataatcccagcactttgggaggccaaggtgggtggatcagttggatacagatcaggtcag

SEQ ID NO: 1642 - DNA, 150 bp, Artificial Sequence
  Synthetic polynucleotide
ctaatacgactcactataggcactgtagcttccggatgagcagctcggtcgacttctgataacgacgaatctctcgaagcgccacggtcccgggcctgcagcgagcaggggaggagtgagcggacgtcagttggatacagatcaggtcag

SEQ ID NO: 1643 - DNA, 150 bp, Artificial Sequence
  Synthetic polynucleotide
ctaatacgactcactataggcactgttgagacaggatctcactctcgcccaggctggagtgcagtggagcaatctcagctcactgcaacccccgcctaccgggttcaagagattctcctgcctcattcagttggatacagatcaggtcag

SEQ ID NO: 1644 - DNA, 150 bp, Artificial Sequence
  Synthetic polynucleotide
ctaatacgactcactataggcactgttttcacgccgccggtagccggcgcgctcttgcgagcagccttggtagccagctgcttgcgtggcgctttaccgccggtggatttccgagctgtctgtttatcagttggatacagatcaggtcag

SEQ ID NO: 1645 - DNA, 150 bp, Artificial Sequence
  Synthetic polynucleotide
ctaatacgactcactataggcactgtggctctgataaggtctgtgatcattaacttgtaggaatggtggcctggaaagatctgggccaacccacctcccacctagtgggggtgggggatgggggtgtcagttggatacagatcaggtcag

SEQ ID NO: 1646 - DNA, 150 bp, Artificial Sequence
  Synthetic polynucleotide
ctaatacgactcactataggcactgttcaccgctccggcctggctcagggcagctctccccaaggacctccgccttccccggagctgtgtcggcccaggactgcagggcgtgagcccagaccccggtcagttggatacagatcaggtcag

SEQ ID NO: 1647 - DNA, 150 bp, Artificial Sequence
  Synthetic polynucleotide
ctaatacgactcactataggcactgtaggctggagtgcagtggcaccatctcggctcactgcaagctccgcctcccaggttcacgccattctcctgcctcagcctcccgagtagctgggactacagtcagttggatacagatcaggtcag

SEQ ID NO: 1648 - DNA, 150 bp, Artificial Sequence
  Synthetic polynucleotide
ctaatacgactcactataggcactgttccctcaagtccccaccccagcgcctggcacggccgggaagcgccgggcgggggagcgcggagcgaagctgccccgcggccctttgtgcgcctgaccccgtcagttggatacagatcaggtcag

SEQ ID NO: 1649 - DNA, 150 bp, Artificial Sequence
  Synthetic polynucleotide
ctaatacgactcactataggcactgtccagatgtgaagcaccagttgacccgcaggtgggggtgccaactggtaggctgtagggttagctctggcctctggcagccagccagttgtctcctaagaatcagttggatacagatcaggtcag

SEQ ID NO: 1650 - DNA, 150 bp, Artificial Sequence
  Synthetic polynucleotide
ctaatacgactcactataggcactgttgctgaaatgcagggtgagcagcaggggcggagagtgccctgtgggtaaggcacacctcagaagggacaggtccaggccctctcctccctggcctggagctcagttggatacagatcaggtcag

SEQ ID NO: 1651 - DNA, 150 bp, Artificial Sequence
  Synthetic polynucleotide
ctaatacgactcactataggcactgtctacttgggaggctgaggcaggaggattgcttgaacccgggagggcagtgagctgagatgatgccactgcactccagcctgggtgacagagcgagactcttcagttggatacagatcaggtcag

SEQ ID NO: 1652 - DNA, 150 bp, Artificial Sequence
  Synthetic polynucleotide
ctaatacgactcactataggcactgtatgctcaatgcacttgcagtctccatcccccagcagactgcaaatctgacatgcctcctccgaacggcaagggggagaggtacgtatggtacacacactgtcagttggatacagatcaggtcag

SEQ ID NO: 1653 - DNA, 150 bp, Artificial Sequence
  Synthetic polynucleotide
ctaatacgactcactataggcactgtgctggactgttcccttaccctccgctggtgacagtggaaagctagggctatcagctggcagggaggctgccactcatgctgtacccaggcctggcactgctcagttggatacagatcaggtcag

SEQ ID NO: 1654 - DNA, 150 bp, Artificial Sequence
  Synthetic polynucleotide
ctaatacgactcactataggcactgtccgggcaagctggccctcagcagccccggacccctgtccccctcaggcatgaaggggacctcccggtactacccctcctacgccagcagctctggcggactcagttggatacagatcaggtcag

SEQ ID NO: 1655 - DNA, 150 bp, Artificial Sequence
  Synthetic polynucleotide
ctaatacgactcactataggcactgtccatggtgcctggttggcagcagggagaggcggggttgggagactgaactgcacttgtgttgaggaggttctgccaacaccctggctctcagggtctctctcagttggatacagatcaggtcag

SEQ ID NO: 1656 - DNA, 150 bp, Artificial Sequence
  Synthetic polynucleotide
ctaatacgactcactataggcactgtcagaaatgaagagggaaggccggctcctccagtacctccccagccccccactgctggggggctgtgctgaggcagggctggatgcagaggctgagcagaatcagttggatacagatcaggtcag

SEQ ID NO: 1657 - DNA, 150 bp, Artificial Sequence
  Synthetic polynucleotide
ctaatacgactcactataggcactgtgggccgggcgcggtggcgcatgcctgtaatcccagcactttgggaggccgaggcgggcatcacgaggtcaggagctcgagaccagcctggctaacatggttcagttggatacagatcaggtcag

SEQ ID NO: 1658 - DNA, 150 bp, Artificial Sequence
  Synthetic polynucleotide
ctaatacgactcactataggcactgtggttcttggctcacgcctgtaatcccagcactttgggaggctgaggcaggtggatcacttgaggtcaggagtttgagaccagcctgaccaacgtggcaaatcagttggatacagatcaggtcag

SEQ ID NO: 1659 - DNA, 150 bp, Artificial Sequence
  Synthetic polynucleotide
ctaatacgactcactataggcactgtgtgcaggacgcagacgcctaaagggcaccatgcagagaaggtgactctgggggtctggctttgggaaccccagccatcacctccttgagggagacctttctcagttggatacagatcaggtcag

SEQ ID NO: 1660 - DNA, 150 bp, Artificial Sequence
  Synthetic polynucleotide
ctaatacgactcactataggcactgtagggtccatgaaagcagtcaaggagcttttccatgactgctttcactaggagttcaaggaccaagctgaacttgtccattgccccaggctagacacagcgtcagttggatacagatcaggtcag

SEQ ID NO: 1661 - DNA, 150 bp, Artificial Sequence
  Synthetic polynucleotide
ctaatacgactcactataggcactgtagctcctcccgccagcgctgcggggacagggcgggagagacctgtcagtggtggtcccctgttgccacccgacatactgacgtgctggcgggccacgcgctcagttggatacagatcaggtcag

SEQ ID NO: 1662 - DNA, 150 bp, Artificial Sequence
  Synthetic polynucleotide
ctaatacgactcactataggcactgtgcactagaattgcttgaatttgggaggcagagattgcagggagctgagattgcaccactgcaatctggcctgggtgacagagcgagaccctgtctcaaaatcagttggatacagatcaggtcag

SEQ ID NO: 1663 - DNA, 150 bp, Artificial Sequence
  Synthetic polynucleotide
ctaatacgactcactataggcactgtgctgctgggaaccccccagcccccagcgaagtgtgggctagagacccagccttaaaggcaacttcagggggctggggtcggggtggcttatgcaatggggtcagttggatacagatcaggtcag

SEQ ID NO: 1664 - DNA, 150 bp, Artificial Sequence
  Synthetic polynucleotide
ctaatacgactcactataggcactgtctcctgcctcagcctcccaagtagctgggattacaggcacgtgccaccacgcccggctaattttttgtatttttagtagaaatagggtttcaccatgttatcagttggatacagatcaggtcag

SEQ ID NO: 1665 - DNA, 150 bp, Artificial Sequence
  Synthetic polynucleotide
ctaatacgactcactataggcactgtgcatcaattttaggcttagaaagcctaatcatgggttcagaactagactgaatatgtgggatcctattcagattcttcaggaacaccaatgactgtgatttcagttggatacagatcaggtcag

SEQ ID NO: 1666 - DNA, 150 bp, Artificial Sequence
  Synthetic polynucleotide
ctaatacgactcactataggcactgtaggtggctttgaggcccgctctcctgccccagctaggtgatctgggcccagcgcctccctccagagggtttgctggtgcctggggctgggcctggtgctctcagttggatacagatcaggtcag

SEQ ID NO: 1667 - DNA, 150 bp, Artificial Sequence
  Synthetic polynucleotide
ctaatacgactcactataggcactgtgggctgaggcaggagaatcacttgaaccagggaggtggtggttgcagtgagcggagatcgcgccactgcactccagcctgggtaacagagtgagtgagactcagttggatacagatcaggtcag

SEQ ID NO: 1668 - DNA, 150 bp, Artificial Sequence
  Synthetic polynucleotide
ctaatacgactcactataggcactgttaccgctgacggggcgcccggggggcctcggccgaggcgagatgctgtgaggctctccttcttccccgtcgaccacgggccggccaaagatggcctccagtcagttggatacagatcaggtcag

SEQ ID NO: 1669 - DNA, 150 bp, Artificial Sequence
  Synthetic polynucleotide
ctaatacgactcactataggcactgtggcgtcgggcctgccccctggtccctgacgccgctcaggtaggcggcgaagacagcggccccggccggcgcccctcggccccgccgccgcagtgggcccctcagttggatacagatcaggtcag

SEQ ID NO: 1670 - DNA, 150 bp, Artificial Sequence
  Synthetic polynucleotide
ctaatacgactcactataggcactgtatgatatatatgagatatatatatcatatatatgagatatatgatatatatatgatatatatgagatatatatatgatatatatatgatatatatatgagtcagttggatacagatcaggtcag

SEQ ID NO: 1671 - DNA, 150 bp, Artificial Sequence
  Synthetic polynucleotide
ctaatacgactcactataggcactgtcaagggagtgtgttactgccttctggagacttggggagtaaccgagtctcagactcagggtccagcctgttcttcctaagggcttgcttgttggcccccgtcagttggatacagatcaggtcag

SEQ ID NO: 1672 - DNA, 150 bp, Artificial Sequence
  Synthetic polynucleotide
ctaatacgactcactataggcactgtgcactccatttgcccaggctggagtgtcgtggcatgatcatggctcactgcagcctcgacctctgaggctcaggtgatcctcctacctcagcctcccaagtcagttggatacagatcaggtcag

SEQ ID NO: 1673 - DNA, 150 bp, Artificial Sequence
  Synthetic polynucleotide
ctaatacgactcactataggcactgtcctccctgggtctacaggactgctggctgaggcctggggcagactgcaggggtggggcctgccctccgagctcagggcccttctctttctcagacactcttcagttggatacagatcaggtcag

SEQ ID NO: 1674 - DNA, 150 bp, Artificial Sequence
  Synthetic polynucleotide
ctaatacgactcactataggcactgtctttgttagctctttcttgaaagagctaacaaagaaagagcattagaatatttatgttatgtcctaaagtgtgaatgttatttgctgtttctccacctattcagttggatacagatcaggtcag

SEQ ID NO: 1675 - DNA, 150 bp, Artificial Sequence
  Synthetic polynucleotide
ctaatacgactcactataggcactgtatttatttattggagacagagattcactctgtcgcccaggctggagtgcagtggcacaatctcagctcactgcaaccaccacctcccaggttcaagtgactcagttggatacagatcaggtcag

SEQ ID NO: 1676 - DNA, 150 bp, Artificial Sequence
  Synthetic polynucleotide
ctaatacgactcactataggcactgtgcacactacaggtaccgcccccgccaggcaggagactggcggtggaccaggtggagccgaaggcctgtaaacaggcattcttggttcgctctgtgacccctcagttggatacagatcaggtcag

SEQ ID NO: 1677 - DNA, 150 bp, Artificial Sequence
  Synthetic polynucleotide
ctaatacgactcactataggcactgtttttaagagttaactgatccccaaaatgactcagctgtatgcaatttaatgcaatattaattcgcatgttgactctcagaattgcatacagctgagtcattcagttggatacagatcaggtcag

SEQ ID NO: 1678 - DNA, 150 bp, Artificial Sequence
  Synthetic polynucleotide
ctaatacgactcactataggcactgtaggtagacacttagaggtagttaagagccgcggtcgccgagacgccttggggacggtgggccttcggcctaggtgaggggccgccgagggggtgggccactcagttggatacagatcaggtcag

SEQ ID NO: 1679 - DNA, 150 bp, Artificial Sequence
  Synthetic polynucleotide
ctaatacgactcactataggcactgtactgggggaggtcccaaatcccatgaggccttggtgagagctgtaccccagcagccccaccaaggcatttgactgctggggctgtacagcctggaaactgtcagttggatacagatcaggtcag

SEQ ID NO: 1680 - DNA, 150 bp, Artificial Sequence
  Synthetic polynucleotide
ctaatacgactcactataggcactgtggactttgagtacttggagatccggcaactggagacacaagcggaccccactggcaggctgctggacgcctggcagggacgccctggcgcctctgtaggctcagttggatacagatcaggtcag

SEQ ID NO: 1681 - DNA, 150 bp, Artificial Sequence
  Synthetic polynucleotide
ctaatacgactcactataggcactgttcgcccttgctgtttgcagatggactacagcggccccccgagcggcgcccggcggcggaactgctacgaaggcgcctactacaacgaggcgcccagcggttcagttggatacagatcaggtcag

SEQ ID NO: 1682 - DNA, 150 bp, Artificial Sequence
  Synthetic polynucleotide
ctaatacgactcactataggcactgtaagttctagatttaggctaggtgtggtagtccacacctgtaattccagcaatttgggaggccaaggtggaaggatcactcaaggctggcgcatgcctgtatcagttggatacagatcaggtcag

SEQ ID NO: 1683 - DNA, 150 bp, Artificial Sequence
  Synthetic polynucleotide
ctaatacgactcactataggcactgttcatctacaatgtaggggctggtggacctgctccagcagctggtgctgcaccagtgggatcctgcccactccactgctgctgctccagctgagaagaaagtcagttggatacagatcaggtcag

SEQ ID NO: 1684 - DNA, 150 bp, Artificial Sequence
  Synthetic polynucleotide
ctaatacgactcactataggcactgtgtgacgcagtcacagctcactacagcctcagcctccctgggctcaagtgatccttccagctcagcctcctgagtagctggaactacaggtgtgcaccacctcagttggatacagatcaggtcag

SEQ ID NO: 1685 - DNA, 150 bp, Artificial Sequence
  Synthetic polynucleotide
ctaatacgactcactataggcactgttcctaacgagcaccctgctccccactggaaggagaggggccagggctcctccctccccagggaggggagaaacgtgatgttgctattagcaataacagcttcagttggatacagatcaggtcag

SEQ ID NO: 1686 - DNA, 150 bp, Artificial Sequence
  Synthetic polynucleotide
ctaatacgactcactataggcactgtaccgagggctgctgtgacggccaaccgagcgctgtcacggaagccaaggccacgcgcgcggtgagcgccaccagggggcaccgcgtccgaactagaagcctcagttggatacagatcaggtcag

SEQ ID NO: 1687 - DNA, 150 bp, Artificial Sequence
  Synthetic polynucleotide
ctaatacgactcactataggcactgtgctgctgagggctcagcgcccccacgtgggggagtggcaggcgtggggccgggtcctcagcctcggggccccccagcaaggacagggtgtaggtgagcgatcagttggatacagatcaggtcag

SEQ ID NO: 1688 - DNA, 150 bp, Artificial Sequence
  Synthetic polynucleotide
ctaatacgactcactataggcactgtggggccagcaggctgctggctggggcagggtgggcccctcgcagccccagggaagctgcagagattcagatggcccatcctccctggggcagagctctggtcagttggatacagatcaggtcag

SEQ ID NO: 1689 - DNA, 150 bp, Artificial Sequence
  Synthetic polynucleotide
ctaatacgactcactataggcactgtgagtggcctcgctccgcgccggcggccgagcctggccttcccacacagagaaggaccgagggggagaagggtcgccccaggtggcagccccgggcgccgctcagttggatacagatcaggtcag

SEQ ID NO: 1690 - DNA, 150 bp, Artificial Sequence
  Synthetic polynucleotide
ctaatacgactcactataggcactgtttctacaaaaaatacaaaaattagctgggcatggtggcacatgtgcctgtggttccagctactcaggaagctgaggtgggaggatcccttgatccctgagtcagttggatacagatcaggtcag

SEQ ID NO: 1691 - DNA, 150 bp, Artificial Sequence
  Synthetic polynucleotide
ctaatacgactcactataggcactgtaggtgaggggcgcctctgcccggccgcccctactgggaagtgaggagcccctctgcccggccaccaccctgtctgggaggtgtgcccaacagctcattgatcagttggatacagatcaggtcag

SEQ ID NO: 1692 - DNA, 150 bp, Artificial Sequence
  Synthetic polynucleotide
ctaatacgactcactataggcactgtgcagaggcagttgcctctccccagatggtctctgttttctcaaccaagagtatgggtgtggggagaaaaggatgaacagagaaccctgttcatccttaagtcagttggatacagatcaggtcag

SEQ ID NO: 1693 - DNA, 150 bp, Artificial Sequence
  Synthetic polynucleotide
ctaatacgactcactataggcactgtcggcctgcctgcctcctccggcctggccagcatggtggcaggccctgcctgctcccctgggagcctgccgccagggctgatggcgctgacggagggagggtcagttggatacagatcaggtcag

SEQ ID NO: 1694 - DNA, 150 bp, Artificial Sequence
  Synthetic polynucleotide
ctaatacgactcactataggcactgtcctttagcacacagtggcaaggcttgctggaacccaagttctgacaattgtccagtccactgggctggacaattcccctctgatgagggctggcctgaattcagttggatacagatcaggtcag

SEQ ID NO: 1695 - DNA, 150 bp, Artificial Sequence
  Synthetic polynucleotide
ctaatacgactcactataggcactgttcacatgggttcacccatggagagtgggccctccctcacctggtggcgattgatgctcaggtgaaaaggggtacgtggcgggaagggcagggctctcatttcagttggatacagatcaggtcag

SEQ ID NO: 1696 - DNA, 150 bp, Artificial Sequence
  Synthetic polynucleotide
ctaatacgactcactataggcactgttggccaggctggcctcgaactcctgacttcaggtgatctgcccacctcagcctcccaaagtgctgggattacaggcctgagctaccgcaccggccccaattcagttggatacagatcaggtcag

SEQ ID NO: 1697 - DNA, 150 bp, Artificial Sequence
  Synthetic polynucleotide
ctaatacgactcactataggcactgttcggggtagtgagtctccgcgaagaccctttccagctctttgagctgggcactggtgaaagtggtgcggatgcgccgctgcttgcgcttctcgttgaggctcagttggatacagatcaggtcag

SEQ ID NO: 1698 - DNA, 150 bp, Artificial Sequence
  Synthetic polynucleotide
ctaatacgactcactataggcactgtagagacggggtttcaccatgttggtcaggctggtcttgaattcctgacctcaggtgatccacccgcctcagcctccctaagtgctgggattacaggcttgtcagttggatacagatcaggtcag

SEQ ID NO: 1699 - DNA, 150 bp, Artificial Sequence
  Synthetic polynucleotide
ctaatacgactcactataggcactgtccggacgcactgccgggcggggcgtggggcggagggacgagccgagccgagccaagcggagctgggccactgtgcacgcccggagggtcctggcggcgcctcagttggatacagatcaggtcag

SEQ ID NO: 1700 - DNA, 150 bp, Artificial Sequence
  Synthetic polynucleotide
ctaatacgactcactataggcactgtgttcatgtgactgcccacacctgagctcctcaggagattggcctccctccttgaggctccctccttgagttccaccctcatttggggtggaacttggtcttcagttggatacagatcaggtcag

SEQ ID NO: 1701 - DNA, 150 bp, Artificial Sequence
  Synthetic polynucleotide
ctaatacgactcactataggcactgtatggatggcaagcggcggccaggcccagggcccggggtgcccccaaagcgggcccgtgggggcctctgggatgatgatgatgcacctcggccatcccaattcagttggatacagatcaggtcag

SEQ ID NO: 1702 - DNA, 150 bp, Artificial Sequence
  Synthetic polynucleotide
ctaatacgactcactataggcactgtggctgctgggtgaggcagctttacgaggccgaagtcctccatgtcaggagcacttggcctcggactgtcttctgaggcctcggccatcgtgacctggaaatcagttggatacagatcaggtcag

SEQ ID NO: 1703 - DNA, 150 bp, Artificial Sequence
  Synthetic polynucleotide
ctaatacgactcactataggcactgtatcatgtgacaggataactcttcatgtaatagtttaaagatatgtgtctttacattgcacattttaagtcatgtaactctaacagagatacatgacttcatcagttggatacagatcaggtcag

SEQ ID NO: 1704 - DNA, 150 bp, Artificial Sequence
  Synthetic polynucleotide
ctaatacgactcactataggcactgtcggctgaagaaaagccctcgccgcggcggtcgctgtctcagccgttgcctccgcggccgtcgccggccgcccttcccggcggcgaagtctcggggaaaggtcagttggatacagatcaggtcag

SEQ ID NO: 1705 - DNA, 150 bp, Artificial Sequence
  Synthetic polynucleotide
ctaatacgactcactataggcactgtctgaggacgccaagtggcgggtgcggctggccatcattgagtacatgcccctcctggctggacagctggtgagtgaggaggcctgggggccaggcagtgctcagttggatacagatcaggtcag

SEQ ID NO: 1706 - DNA, 150 bp, Artificial Sequence
  Synthetic polynucleotide
ctaatacgactcactataggcactgtcgggcgcctgtagtcccagctacttgggaggcggaggcaggagaatggcgtgaacccagtaggcagagcttgcagtgagcgaagatcgcaccactgcacttcagttggatacagatcaggtcag

SEQ ID NO: 1707 - DNA, 150 bp, Artificial Sequence
  Synthetic polynucleotide
ctaatacgactcactataggcactgtttcacttcactccttttaaaaatggggtgattgccgggcgcggtggctcacgcctgtaatcccagcactttgggaggctgaggacagcagatcacctgagtcagttggatacagatcaggtcag

SEQ ID NO: 1708 - DNA, 150 bp, Artificial Sequence
  Synthetic polynucleotide
ctaatacgactcactataggcactgtatgtgtatatatatgtgtgtatatatatgtatatatatatacacacatatatgaatatatatgtgtatatatattcacacacacatatctccttcttatctcagttggatacagatcaggtcag

SEQ ID NO: 1709 - DNA, 150 bp, Artificial Sequence
  Synthetic polynucleotide
ctaatacgactcactataggcactgtgccaccgtgcccagcctattattttctaaattgaggtataaaatatggggagagaggctgggtgaggtggctgacgtctgtaatcccagcactctgggagtcagttggatacagatcaggtcag

SEQ ID NO: 1710 - DNA, 150 bp, Artificial Sequence
  Synthetic polynucleotide
ctaatacgactcactataggcactgtccctgtggctttgcagggtacagcccccctcctggctgcttccatgggcaggcattgagagtctgttgcttttccaggtgcatggtgcaatctgttggtgtcagttggatacagatcaggtcag

SEQ ID NO: 1711 - DNA, 150 bp, Artificial Sequence
  Synthetic polynucleotide
ctaatacgactcactataggcactgtcgagtgcaaagggaagggctcaggccggcgcaggctgctccccggcgcggcatttccccggcgctggccgcggccccggcgggcccccgtctgggtgctctcagttggatacagatcaggtcag

SEQ ID NO: 1712 - DNA, 150 bp, Artificial Sequence
  Synthetic polynucleotide
ctaatacgactcactataggcactgtgtggcatgtgcttgtattcccagctactcaggaggctgaggtgggaggatcacctgagcccaggaggtcaaggctctagtgagccatgatcatgccaccatcagttggatacagatcaggtcag

SEQ ID NO: 1713 - DNA, 150 bp, Artificial Sequence
  Synthetic polynucleotide
ctaatacgactcactataggcactgtgctgcgtggtgggccctgctgtgcgtgccattcagaatgggggccccaccggactcacggtggcttcccacctccctgcccagcctgggctcccgagggctcagttggatacagatcaggtcag

SEQ ID NO: 1714 - DNA, 150 bp, Artificial Sequence
  Synthetic polynucleotide
ctaatacgactcactataggcactgtcaggtgtgagccactgcacctggccagcgatccttaataaatatagataatggccgggcgtggtggctcacacctataataccagtactttgaggggccgtcagttggatacagatcaggtcag

SEQ ID NO: 1715 - DNA, 150 bp, Artificial Sequence
  Synthetic polynucleotide
ctaatacgactcactataggcactgtaacagtgaggaccctcagctgcaggtctgttggagtttgctggaagtccactccagaccctgtttgccagggtatcagcagcagaggctgcagaacagcatcagttggatacagatcaggtcag

SEQ ID NO: 1716 - DNA, 150 bp, Artificial Sequence
  Synthetic polynucleotide
ctaatacgactcactataggcactgtatggagtctagctctgtcgctgaggctggagtgcagtggcatgatctcggctcactgcaacctccgcctcctgggttcaagcgattctcctgcctcagcctcagttggatacagatcaggtcag

SEQ ID NO: 1717 - DNA, 150 bp, Artificial Sequence
  Synthetic polynucleotide
ctaatacgactcactataggcactgtaccctgacggcccgggcggcgcgtgcctggttccggctctcgatggaggagggcctcgccgctcgccggctagagggaaaagtgaactccaccctccggctcagttggatacagatcaggtcag

SEQ ID NO: 1718 - DNA, 150 bp, Artificial Sequence
  Synthetic polynucleotide
ctaatacgactcactataggcactgtagccacatgctgcctaaatgactttttaaagtccaaggtgggtgcaaggcagcagttgtgatgttcccaggctatggtgaaactatataccagccataactcagttggatacagatcaggtcag

SEQ ID NO: 1719 - DNA, 150 bp, Artificial Sequence
  Synthetic polynucleotide
ctaatacgactcactataggcactgtttccaaagacagggctgggcccggcctgggcctccctgaaggcagagaaggacgggccctgtggaggcagccccatgtcgggctgaagaggctggcctgctcagttggatacagatcaggtcag

SEQ ID NO: 1720 - DNA, 150 bp, Artificial Sequence
  Synthetic polynucleotide
ctaatacgactcactataggcactgtgcagagccggggattggagaaggacgggaaggcggatcacctccggcgccgcccgccccgcccttctccggctcgcgctggtggagcgcgaccgccaccttcagttggatacagatcaggtcag

SEQ ID NO: 1721 - DNA, 150 bp, Artificial Sequence
  Synthetic polynucleotide
ctaatacgactcactataggcactgtctgtagtcccggctactccggaggatgaggcaggagaatggcgtgaacccaggaggcagaggttgcagttagcagagatcacgccactgcactccagccttcagttggatacagatcaggtcag

SEQ ID NO: 1722 - DNA, 150 bp, Artificial Sequence
  Synthetic polynucleotide
ctaatacgactcactataggcactgtcagggcaggtctcctgccaggcaggctgggagcagctcctttccttgctccagctctctgttctccactccccagacagcagcaaggcccagggggccactcagttggatacagatcaggtcag

SEQ ID NO: 1723 - DNA, 150 bp, Artificial Sequence
  Synthetic polynucleotide
ctaatacgactcactataggcactgtcaggtggatgttcatgtttctgaccttgcactaccccaatgtaggctccaaacaggcatgcgaggtgcctttggaaagccccagggcactgtggccagggtcagttggatacagatcaggtcag

SEQ ID NO: 1724 - DNA, 150 bp, Artificial Sequence
  Synthetic polynucleotide
ctaatacgactcactataggcactgttttaagccaaaattgtcagtggagcttggaggccgaggggtccctgggccccggaagctcctttaacatggaatacgtgcctcctgcctcttcctctagatcagttggatacagatcaggtcag

SEQ ID NO: 1725 - DNA, 150 bp, Artificial Sequence
  Synthetic polynucleotide
ctaatacgactcactataggcactgtccgggtggtcggccagcacctccaccatgctgcggtcgccgctcctcagcttgccggccagggcagcgccggcgtccggggcgcccagcggcaacgcctctcagttggatacagatcaggtcag

SEQ ID NO: 1726 - DNA, 150 bp, Artificial Sequence
  Synthetic polynucleotide
ctaatacgactcactataggcactgtcacccagaaattacaactcctttatctactgggctgctgttctcactggggaagtccccagttgcctggttggcacattgttccagccaaccaggtattttcagttggatacagatcaggtcag

SEQ ID NO: 1727 - DNA, 150 bp, Artificial Sequence
  Synthetic polynucleotide
ctaatacgactcactataggcactgtagcagtatctacttatgttaaaagcctagacttctaggcttttaacagtattaatttggtttctataaaccagtttgactggaataatgcagaagatatatcagttggatacagatcaggtcag

SEQ ID NO: 1728 - DNA, 150 bp, Artificial Sequence
  Synthetic polynucleotide
ctaatacgactcactataggcactgtgcaagactccgtctcaaattaattaattaattaattaattaattaaaaggtaatgaggctgggcactttgggatgcccaggcaggcagatcacttgagtttcagttggatacagatcaggtcag

SEQ ID NO: 1729 - DNA, 150 bp, Artificial Sequence
  Synthetic polynucleotide
ctaatacgactcactataggcactgtgaggcgtccccggagccaggccccggccccgccgcccctggcctgcccaaggcccgcagctctgaggagctggccccgccgcggccgcccgggccctgcttcagttggatacagatcaggtcag

SEQ ID NO: 1730 - DNA, 150 bp, Artificial Sequence
  Synthetic polynucleotide
ctaatacgactcactataggcactgtgctgacctgggtggtggtgaggccggtggcctcggccagctcccgcttctcacgcggcgatgggtagggattgtgcgcgtaccactcccgcaggacaccctcagttggatacagatcaggtcag

SEQ ID NO: 1731 - DNA, 150 bp, Artificial Sequence
  Synthetic polynucleotide
ctaatacgactcactataggcactgtcccggtcgcgctgccgccggttcttgaaccagttgctgacctgtgtggtggtgaggcccgtggcctccgccagctcacgcttctcgcggggtgaagggtatcagttggatacagatcaggtcag

SEQ ID NO: 1732 - DNA, 150 bp, Artificial Sequence
  Synthetic polynucleotide
ctaatacgactcactataggcactgtgggcatggtggctcatgcctgtaatcccagcactttgggaggccgaggcgggcgggtcacctgaggtcaggagttcgaaaccagcctgaccaacatggagtcagttggatacagatcaggtcag

SEQ ID NO: 1733 - DNA, 150 bp, Artificial Sequence
  Synthetic polynucleotide
ctaatacgactcactataggcactgtatgttgaagcatcaagcaaagccagagccagacgtggctgacgtggctcagcctcacctcaggggccagggcacaagccgcagctgctcctggccctgtctcagttggatacagatcaggtcag

SEQ ID NO: 1734 - DNA, 150 bp, Artificial Sequence
  Synthetic polynucleotide
ctaatacgactcactataggcactgtgctgggattacaggtgtgtgccaccacgcctggctaatttttgtatttagtagagacggggtttcaccgtgttggccaggctggtctggaactcctgacctcagttggatacagatcaggtcag

SEQ ID NO: 1735 - DNA, 150 bp, Artificial Sequence
  Synthetic polynucleotide
ctaatacgactcactataggcactgttccaggggcaacacagggctggggctggggctggggccagggccgggcaggcagccctccagtcgggcccatccactcaagcccctggtgtctctgcccatcagttggatacagatcaggtcag

SEQ ID NO: 1736 - DNA, 150 bp, Artificial Sequence
  Synthetic polynucleotide
ctaatacgactcactataggcactgttggggatggggaactggaaggacaaggaccacctgcagttctcagctggtggaccctggtgggcagggcccaccccaggcctggcagggccccgctcctctcagttggatacagatcaggtcag

SEQ ID NO: 1737 - DNA, 150 bp, Artificial Sequence
  Synthetic polynucleotide
ctaatacgactcactataggcactgtctcagcgggagttcatgctgagctttgccagagaccctcagggtttcatcaatgactggcttcagtcccagtgcagggacctcaaggtaaagaacctaggtcagttggatacagatcaggtcag

SEQ ID NO: 1738 - DNA, 150 bp, Artificial Sequence
  Synthetic polynucleotide
ctaatacgactcactataggcactgtcatgcacagctacatcgcggccttcggggccgtcacgggcctctgcacgctcttcaccctggtcagccgcgggagggcaggcccggggggccctcagccttcagttggatacagatcaggtcag

SEQ ID NO: 1739 - DNA, 150 bp, Artificial Sequence
  Synthetic polynucleotide
ctaatacgactcactataggcactgtaaagcagttccgctggcggctgtcgcgcaccaggaaggtgcccacgggctcggcgcgcagccgctcgtgcgccccgtgcacgctcaggggcccccagtagtcagttggatacagatcaggtcag

SEQ ID NO: 1740 - DNA, 150 bp, Artificial Sequence
  Synthetic polynucleotide
ctaatacgactcactataggcactgtcgggcgctgtgggacctcgtcagccgctcggcccgcgtcgcggcgttgggcctcgggtgtcggcggtgcgggcggccaagccgcgccgccttcgaagagctcagttggatacagatcaggtcag

SEQ ID NO: 1741 - DNA, 150 bp, Artificial Sequence
  Synthetic polynucleotide
ctaatacgactcactataggcactgtgctgggtgcggtggctcacccctgtaatctcagcactttgggaggccaaagcgggcgcatcacttgaggtcaggacttcgaggccagcctggccaacgtgtcagttggatacagatcaggtcag

SEQ ID NO: 1742 - DNA, 150 bp, Artificial Sequence
  Synthetic polynucleotide
ctaatacgactcactataggcactgtggactcacgctggccccaccacctccctgggcctccctcagccactagagccctgagcacagcacctaggaggatggtgggcaccgggcttgtggctgactcagttggatacagatcaggtcag

SEQ ID NO: 1743 - DNA, 150 bp, Artificial Sequence
  Synthetic polynucleotide
ctaatacgactcactataggcactgtagggctgcgggcgggacgagcaagcacagcggggttaattccaggcagcggggccggccccgcccgcgcgctcccgcccaggccgccattatctcgccgctcagttggatacagatcaggtcag

SEQ ID NO: 1744 - DNA, 150 bp, Artificial Sequence
  Synthetic polynucleotide
ctaatacgactcactataggcactgtgctcactgcagcctctgcctcccaggttcaagcagttctcctgcctcagcctcccgagtagctgggcttccaggcgtgtgccaccacgcccagctaattttcagttggatacagatcaggtcag

SEQ ID NO: 1745 - DNA, 150 bp, Artificial Sequence
  Synthetic polynucleotide
ctaatacgactcactataggcactgtacttgggaggatgaggtaggaggatcgcttgggcctgagaggtcgaggctgcagtgagctgtgatcatgccactgcagcccagcctgagtggcagagcaatcagttggatacagatcaggtcag

SEQ ID NO: 1746 - DNA, 150 bp, Artificial Sequence
  Synthetic polynucleotide
ctaatacgactcactataggcactgtcctgatgccctggtgcagtggctcaagcccgtaatcccaatactttgggaagccaaagtgggggattgtttgagcccaggagttcgagaccagcctgggctcagttggatacagatcaggtcag

SEQ ID NO: 1747 - DNA, 150 bp, Artificial Sequence
  Synthetic polynucleotide
ctaatacgactcactataggcactgtcatccttggggcctggctgcaatttgaccccaggcccagggtcttctgcctttcagagccctggtgccctgagacgggcagccaggcaaatcccaggcagtcagttggatacagatcaggtcag

SEQ ID NO: 1748 - DNA, 150 bp, Artificial Sequence
  Synthetic polynucleotide
ctaatacgactcactataggcactgtttgacacagggcccagctctggcctgaaggccatgccagatccaaggatcactctggcctcgggccctcccaggccttcaacaaatgaggcctgagtgtgtcagttggatacagatcaggtcag

SEQ ID NO: 1749 - DNA, 150 bp, Artificial Sequence
  Synthetic polynucleotide
ctaatacgactcactataggcactgtgtgatcccagctacttggaaggctgaggtgggaggattagctaagcccaggaaggccaaggctgcagtaagccttgatctgccactgcattccagcctagtcagttggatacagatcaggtcag

SEQ ID NO: 1750 - DNA, 150 bp, Artificial Sequence
  Synthetic polynucleotide
ctaatacgactcactataggcactgtagaaggcgccccccatggcaaactggctggggtgcaggaagagcgggtgcccgttgaagaactgttggcccgccaggcccggggcgaagccgaggccaggtcagttggatacagatcaggtcag

SEQ ID NO: 1751 - DNA, 150 bp, Artificial Sequence
  Synthetic polynucleotide
ctaatacgactcactataggcactgtgcactgggccaccagcgcgcggaaagccgccgggtccccgcgctgcaccagccgccagccctggggccccaggcgccgcacgaacgtggccagcggcagctcagttggatacagatcaggtcag

SEQ ID NO: 1752 - DNA, 150 bp, Artificial Sequence
  Synthetic polynucleotide
ctaatacgactcactataggcactgttactgaaatctataattgctactgtctgtcaagacagtttgatattgcccaggcgcagtggctcacgcctgtaattccagcactttcggaggccgaggtgtcagttggatacagatcaggtcag

SEQ ID NO: 1753 - DNA, 150 bp, Artificial Sequence
  Synthetic polynucleotide
ctaatacgactcactataggcactgtatgtccttcttatttcttaggtgagacagggtcttaggtctcacctgagaaatctgtgcacccaagttcatcctggttggctgccaaatgaagccaaacttcagttggatacagatcaggtcag

SEQ ID NO: 1754 - DNA, 150 bp, Artificial Sequence
  Synthetic polynucleotide
ctaatacgactcactataggcactgtgcaggggaggagagaggggcacgcccagaatcccatggaaccttccgtgccccagctttctctcatggatgtaaaatgtgaaacgcccaactgccccttctcagttggatacagatcaggtcag

SEQ ID NO: 1755 - DNA, 150 bp, Artificial Sequence
  Synthetic polynucleotide
ctaatacgactcactataggcactgtcctggcctcctgtgcctggcctcctgggcactgaccccgctgtgtggacccggctgtggccctgggagccctgtgcacagcccccggggacgcagcttcttcagttggatacagatcaggtcag

SEQ ID NO: 1756 - DNA, 150 bp, Artificial Sequence
  Synthetic polynucleotide
ctaatacgactcactataggcactgtcctgggcaaccagccctgtcgtctctccagccccagctgctcaccatcgctatctgagcagcgctcatggtgggggcagcgcctcacaacctccgtcatgtcagttggatacagatcaggtcag

SEQ ID NO: 1757 - DNA, 150 bp, Artificial Sequence
  Synthetic polynucleotide
ctaatacgactcactataggcactgtaatgctgaggcactcctcagcattgacaaaatcatgtattttgtcaagtgtcttagtcttttcaggctgtgataacaaataccatcaactagttagcttatcagttggatacagatcaggtcag

SEQ ID NO: 1758 - DNA, 150 bp, Artificial Sequence
  Synthetic polynucleotide
ctaatacgactcactataggcactgtgtggctcagccagaggcaggcacctgtggccctcactcctgccctcgggaagctcagccgaggttctctgggggcctggccctgccttccctctgagccttcagttggatacagatcaggtcag

SEQ ID NO: 1759 - DNA, 150 bp, Artificial Sequence
  Synthetic polynucleotide
ctaatacgactcactataggcactgtcactagttgacaccatacttgtggtggttcagttatcagccgtgtcgatggggaactcagagtctgaggtagctgccctggcatatttaacaacatcagctcagttggatacagatcaggtcag

SEQ ID NO: 1760 - DNA, 150 bp, Artificial Sequence
  Synthetic polynucleotide
ctaatacgactcactataggcactgtcctggtgtccctgcagtgcaggaaaggtagggccgggtggggccctgcagtgcaggaaaggtagggccgggtggggccctgcagtgtggcgccaagagcctcagttggatacagatcaggtcag

SEQ ID NO: 1761 - DNA, 150 bp, Artificial Sequence
  Synthetic polynucleotide
ctaatacgactcactataggcactgtatggcgacaggcaccccatcctctgtcggccttggccccggcacactaagcggctgcaccactgtctcgctttcgcctgttggccttggccctggcacactcagttggatacagatcaggtcag

SEQ ID NO: 1762 - DNA, 150 bp, Artificial Sequence
  Synthetic polynucleotide
ctaatacgactcactataggcactgtgaccaggtgcggtggctcacacacctgtaatctcagccttttgggaggccgaggcaggtggatcacctgaggtcaggagttcgagaccagcctggccaactcagttggatacagatcaggtcag

SEQ ID NO: 1763 - DNA, 150 bp, Artificial Sequence
  Synthetic polynucleotide
ctaatacgactcactataggcactgtgttggtcaggctggtctcgaactgctgacctcgtgatccgcccgcctcggcctcccaaagtgctgggcttatgggcatgagcctccgcgcccggcccagatcagttggatacagatcaggtcag

SEQ ID NO: 1764 - DNA, 150 bp, Artificial Sequence
  Synthetic polynucleotide
ctaatacgactcactataggcactgtagtcagggctgcccggctggggcgttcccaagtccgccggctcatgcgtcccctccggggtcccaaggacccagacgcagagcccagcgccttcctaccttcagttggatacagatcaggtcag

SEQ ID NO: 1765 - DNA, 150 bp, Artificial Sequence
  Synthetic polynucleotide
ctaatacgactcactataggcactgttattttatttatttatttttatttttgagacgaagtctcatgccgttgcccaggctggagtgcagtggcgcaacctcggctcactgcaagctccgcctcctcagttggatacagatcaggtcag

SEQ ID NO: 1766 - DNA, 150 bp, Artificial Sequence
  Synthetic polynucleotide
ctaatacgactcactataggcactgtttagtagagacagggtttcgccatgttggccaggctggtcttgaactcctgacctcaggtgttccacctgccttggcctcccaaagtgttgggattacaatcagttggatacagatcaggtcag

SEQ ID NO: 1767 - DNA, 150 bp, Artificial Sequence
  Synthetic polynucleotide
ctaatacgactcactataggcactgtggggtttcaccatgttagccaggctggtctcgaactctggacctcaggtgattcacccgcctcggcctcccaaagtgttgggattacaggcgtgagccactcagttggatacagatcaggtcag

SEQ ID NO: 1768 - DNA, 150 bp, Artificial Sequence
  Synthetic polynucleotide
ctaatacgactcactataggcactgtggctcacttcaacctccacctccctggttcaagcgattctcctgcctcagcctcccaagtagctgggattacaggcatgcaccaccacgcccggctaatttcagttggatacagatcaggtcag

SEQ ID NO: 1769 - DNA, 150 bp, Artificial Sequence
  Synthetic polynucleotide
ctaatacgactcactataggcactgtacagtacaattaagtattttgagagagataccatattcacataaattttattatagcatactgctatcattgttccattttagtgttactaatgttcatctcagttggatacagatcaggtcag

SEQ ID NO: 1770 - DNA, 150 bp, Artificial Sequence
  Synthetic polynucleotide
ctaatacgactcactataggcactgtagaactattttagtgtttcaagcactgtctttagtactccttcataaggtctttactctgtcttcaagtatgttgcagcattttttgttttgaataatattcagttggatacagatcaggtcag

SEQ ID NO: 1771 - DNA, 150 bp, Artificial Sequence
  Synthetic polynucleotide
ctaatacgactcactataggcactgtccctggtgctgcccctgacagaccacctgggcctggatgtcctcccccacaggcactgcccgtcacccacccctcgggccggcaaaggcaccccacctgctcagttggatacagatcaggtcag

SEQ ID NO: 1772 - DNA, 150 bp, Artificial Sequence
  Synthetic polynucleotide
ctaatacgactcactataggcactgtttgtccttaaatagccaccattccctcctgaggcataaatcttagacagaggacttctgcagcaggaaagaaatttacccttcacatttaaggcaacttttcagttggatacagatcaggtcag

SEQ ID NO: 1773 - DNA, 150 bp, Artificial Sequence
  Synthetic polynucleotide
ctaatacgactcactataggcactgttgaggagtcaaaagttccccaggggctaggccaggataagacctaactgggtcaaggagcatgtagccgtggtggcctggggatgtggtgggatggtagctcagttggatacagatcaggtcag

SEQ ID NO: 1774 - DNA, 150 bp, Artificial Sequence
  Synthetic polynucleotide
ctaatacgactcactataggcactgtccctttcacatgctgtttcctttgcttagaacgcatctttcttcttcctgccccacccttgttagatacgcattcatctggccagacctgatggctcatgtcagttggatacagatcaggtcag

SEQ ID NO: 1775 - DNA, 150 bp, Artificial Sequence
  Synthetic polynucleotide
ctaatacgactcactataggcactgtaaagattcctttaaagggagcagttctagttatctctctctttaggtaccatatgctgaacgtttttctatgcactaaaacagcaactaggttttatacttcagttggatacagatcaggtcag

SEQ ID NO: 1776 - DNA, 150 bp, Artificial Sequence
  Synthetic polynucleotide
ctaatacgactcactataggcactgttcaggtgagtatcagtgcctggggaagattgagagggtttgggatcttcttagtgtagacaatgggaatgtctcatctttagccaccttggtctttctcttcagttggatacagatcaggtcag

SEQ ID NO: 1777 - DNA, 150 bp, Artificial Sequence
  Synthetic polynucleotide
ctaatacgactcactataggcactgtgtgcatcaaatattactttgttttaaaaaatcatgtcattgctcattttaaaaattataatatcaatcctttttataatgatttaaagtaatttaatatatcagttggatacagatcaggtcag

SEQ ID NO: 1778 - DNA, 150 bp, Artificial Sequence
  Synthetic polynucleotide
ctaatacgactcactataggcactgtctttatgttttgcttgtgacagcagtacttggctatggcagttaaatggactgtaagatgttagcttgatttggagtaccctgagtagctgcacaggtagtcagttggatacagatcaggtcag

SEQ ID NO: 1779 - DNA, 150 bp, Artificial Sequence
  Synthetic polynucleotide
ctaatacgactcactataggcactgtagttttgttaaccacttgtgctaatagaggagcactgtcttaaaataacttacttgcttagatgtgagaatatttgaaataccttgtttcttaattttgttcagttggatacagatcaggtcag

SEQ ID NO: 1780 - DNA, 150 bp, Artificial Sequence
  Synthetic polynucleotide
ctaatacgactcactataggcactgtagcagtgacagaagcactttaaagtccaggtgtccactgtgtcccagagcctgaccgctccgtggagtcatctgatatggggtcctagtatttgcaatagtcagttggatacagatcaggtcag

SEQ ID NO: 1781 - DNA, 150 bp, Artificial Sequence
  Synthetic polynucleotide
ctaatacgactcactataggcactgtctccccgcatcccctagcccggccgtgcacccggaccctggtgctcagacctgcctgcccctcagtcctcctcagacacaagggcctgagccacgggggctcagttggatacagatcaggtcag

SEQ ID NO: 1782 - DNA, 150 bp, Artificial Sequence
  Synthetic polynucleotide
ctaatacgactcactataggcactgtttacacttttaatagcaaactaaaattatatacattttagagttattaaatgaacattttaatacagatatactccataataaatcttattcatttagggtcagttggatacagatcaggtcag

SEQ ID NO: 1783 - DNA, 150 bp, Artificial Sequence
  Synthetic polynucleotide
ctaatacgactcactataggcactgttaaaaaaggactaataccaatccttcacaaactcttctaaaaaacagaaaaggaggcaacatttcccaactcattttatgaaaacagtattgccctgatatcagttggatacagatcaggtcag

SEQ ID NO: 1784 - DNA, 150 bp, Artificial Sequence
  Synthetic polynucleotide
ctaatacgactcactataggcactgtcttcagccccaggagtggtgctgtggtaacccccaagacccaccccaccccacgacgcggccgtacctctgcttggagggtgctcggctggctctctttttcagttggatacagatcaggtcag

SEQ ID NO: 1785 - DNA, 150 bp, Artificial Sequence
  Synthetic polynucleotide
ctaatacgactcactataggcactgtggacggctccctgggacagatgggactgatgggactaatgggactaacgggactccctgggacagatggcagatgggactcatggttgagcaggaatttgtcagttggatacagatcaggtcag

SEQ ID NO: 1786 - DNA, 150 bp, Artificial Sequence
  Synthetic polynucleotide
ctaatacgactcactataggcactgtctcccacacacctggcatggctattatgggccttggccaactccggggcattgccaatcgcatatcctttgctctacggggaagaaaataaggccgtatctcagttggatacagatcaggtcag

SEQ ID NO: 1787 - DNA, 150 bp, Artificial Sequence
  Synthetic polynucleotide
ctaatacgactcactataggcactgtgtcttcaccactggcttcccctggctgggagggaagggactggaggcattgatgctagaagccaagagaccaagttctggcccagttcgccagacacacctcagttggatacagatcaggtcag

SEQ ID NO: 1788 - DNA, 150 bp, Artificial Sequence
  Synthetic polynucleotide
ctaatacgactcactataggcactgtgaaggcccccaaaccttatgctagggtttccctccatgggccagtaataatcccaaagaacacccaccttgactgccgaagatacgtatggcaaacagcttcagttggatacagatcaggtcag

SEQ ID NO: 1789 - DNA, 150 bp, Artificial Sequence
  Synthetic polynucleotide
ctaatacgactcactataggcactgttgggtggtcagggtaagtatagactcatctcatctgttttagtcgccacgcagcattttaatgtgatgtgttacccttttgattgtttaactggccaccttcagttggatacagatcaggtcag

SEQ ID NO: 1790 - DNA, 150 bp, Artificial Sequence
  Synthetic polynucleotide
ctaatacgactcactataggcactgtttcactttattttcatagcactcctatgatctacttaacacatatggcctactagaagttcagtgcataccataaggagggggaggaggatcaagagatgtcagttggatacagatcaggtcag

SEQ ID NO: 1791 - DNA, 150 bp, Artificial Sequence
  Synthetic polynucleotide
ctaatacgactcactataggcactgtagtttgcctgctgcacatggattcctgccgactattaaataaatccctagctcatatgctaacattgctaggagcagattaggtcctattagttataaaatcagttggatacagatcaggtcag

SEQ ID NO: 1792 - DNA, 150 bp, Artificial Sequence
  Synthetic polynucleotide
ctaatacgactcactataggcactgtcattgatggacatggctctgatgatagtaaaaataagattaatgacaatgagattcatcagtttaacaaaaacaactccaatcaagcagtagctgtaacttcagttggatacagatcaggtcag

SEQ ID NO: 1793 - DNA, 150 bp, Artificial Sequence
  Synthetic polynucleotide
ctaatacgactcactataggcactgtaaataataataataataaaaataacaaaatatctagtgttggaaaaaatgtacagaaacaggcactctcatacatagcttgtaggtgtgtatgaaattcatcagttggatacagatcaggtcag

SEQ ID NO: 1794 - DNA, 150 bp, Artificial Sequence
  Synthetic polynucleotide
ctaatacgactcactataggcactgtaattttagcacagagatagcatcacttaaccttcccgagtgaaaattcctgccttctaggtggtggggaagatcaaacgagctgtggatgccagcatacttcagttggatacagatcaggtcag

SEQ ID NO: 1795 - DNA, 150 bp, Artificial Sequence
  Synthetic polynucleotide
ctaatacgactcactataggcactgtggcaaggccctgaggtgtgtgctctgcctgcaggcagcagagaaacaaatgaaggacaaacaggacgaggagcagaggcttaaggaggaggaagaagacatcagttggatacagatcaggtcag

SEQ ID NO: 1796 - DNA, 150 bp, Artificial Sequence
  Synthetic polynucleotide
ctaatacgactcactataggcactgtatttagaatagctccaaaggggctacaggcctcagagaaaattccctcaacctttgtcaggtgggacaggttatggattttgggataaaagagatccaagtcagttggatacagatcaggtcag

SEQ ID NO: 1797 - DNA, 150 bp, Artificial Sequence
  Synthetic polynucleotide
ctaatacgactcactataggcactgtccgaattaatagactggatttgctgattacctacctaaacactagaaaggaggagatggaaagggaacttcagacaccaggcagggctcaaatttctgcctcagttggatacagatcaggtcag

SEQ ID NO: 1798 - DNA, 150 bp, Artificial Sequence
  Synthetic polynucleotide
ctaatacgactcactataggcactgtttcatatctgctgcattcagtgtgttacagtgtgatattttggttgaagtttatggagaaaattcagctacccacaaatatgtagttggaaagggggaggtcagttggatacagatcaggtcag

SEQ ID NO: 1799 - DNA, 150 bp, Artificial Sequence
  Synthetic polynucleotide
ctaatacgactcactataggcactgtttttattagttagaacagaaacaattttaggggcttttctttgtgaccattacaagaaggcattttgaaaaatctaaagatttaagtttcaaccatattatcagttggatacagatcaggtcag

SEQ ID NO: 1800 - DNA, 150 bp, Artificial Sequence
  Synthetic polynucleotide
ctaatacgactcactataggcactgtagagcctcagccatccctcctgtaaaatggggctaaggagagaacctacttctagggttctgtgaatgattacacaagaaaaagcgccaggtgctgggcctcagttggatacagatcaggtcag

SEQ ID NO: 1801 - DNA, 150 bp, Artificial Sequence
  Synthetic polynucleotide
ctaatacgactcactataggcactgtctccttacctcgtaggtgtgatcttcctccatgccagccttgctgtcatcctgggggcggagagggatggagatcagagtgttagtgtcccccagccccatcagttggatacagatcaggtcag

SEQ ID NO: 1802 - DNA, 150 bp, Artificial Sequence
  Synthetic polynucleotide
ctaatacgactcactataggcactgtccgatgactatggagttaatgccacaatcacaaaacacttgagatttattttagaaagaaagaaaagttattgttgccacgtatatcagagtaatcttgatcagttggatacagatcaggtcag

SEQ ID NO: 1803 - DNA, 150 bp, Artificial Sequence
  Synthetic polynucleotide
ctaatacgactcactataggcactgttcaagacaggtgaagggaaatgaagttaaggcctgcaaactccctgtgtgttcttggagaaggaaagcaagcaaaatatgcaaggtgtgtaacaagcacctcagttggatacagatcaggtcag

SEQ ID NO: 1804 - DNA, 150 bp, Artificial Sequence
  Synthetic polynucleotide
ctaatacgactcactataggcactgtttgttaaaaagagaaaacttgtttgtttgttaaaacaaattctcacaaaacttttaagttacacttagcttctgggaatgttgaacttcaatttcttttttcagttggatacagatcaggtcag

SEQ ID NO: 1805 - DNA, 150 bp, Artificial Sequence
  Synthetic polynucleotide
ctaatacgactcactataggcactgtcatacagtctgtacattttcagtcagaatacactggccttgcaaaaatttcagtattaaggaagtttatgcacagatactaaattatttatcttgttatttcagttggatacagatcaggtcag

SEQ ID NO: 1806 - DNA, 150 bp, Artificial Sequence
  Synthetic polynucleotide
ctaatacgactcactataggcactgtgtggggtgaccgggctgcaggtgcatggtggtctggccgcagtgcgcgatctggaactgcaggtgcggggcggccaggtgcgcgggcggcgggtgcgggttcagttggatacagatcaggtcag

SEQ ID NO: 1807 - DNA, 150 bp, Artificial Sequence
  Synthetic polynucleotide
ctaatacgactcactataggcactgtgctggacagtgagacagagagtgaccatgatgatgcgtgagttccctgaggcctgggacttgggggtgggatggccagagacatggccctcactgtcccttcagttggatacagatcaggtcag

SEQ ID NO: 1808 - DNA, 150 bp, Artificial Sequence
  Synthetic polynucleotide
ctaatacgactcactataggcactgttccagctaatctcatattgagaacacttaagtgtttcccactagtcctctggcttccaacagatggatcttctctggctgacaacctaagttgtgtgtcatcagttggatacagatcaggtcag

SEQ ID NO: 1809 - DNA, 150 bp, Artificial Sequence
  Synthetic polynucleotide
ctaatacgactcactataggcactgtgacatatctatctatattctgggagctgggggaacagctttatgtcccagccccattccctttccacttcctcctccctccagccctgaggaaatcctagtcagttggatacagatcaggtcag

SEQ ID NO: 1810 - DNA, 150 bp, Artificial Sequence
  Synthetic polynucleotide
ctaatacgactcactataggcactgtcatggtgaaacctcatctctactaaaaatacaaaaattagctgagcgtggtggtgggtgcctgtaatcctagctacctaggagggtgacaccggagaatttcagttggatacagatcaggtcag

SEQ ID NO: 1811 - DNA, 150 bp, Artificial Sequence
  Synthetic polynucleotide
ctaatacgactcactataggcactgtgtaactgtaataacgatctcttaaaagtctgtttagggacaggtgcagtggctcattcctgtaatcccaacactttgggaggttgatgcaggaggattgctcagttggatacagatcaggtcag

SEQ ID NO: 1812 - DNA, 150 bp, Artificial Sequence
  Synthetic polynucleotide
ctaatacgactcactataggcactgtcatctctagtaaaaatacaaaaatttgcagggcctggtggcaggtgcctgtaatcccagctattcgggaggctgaggcaggagaatcgcttgaacccggctcagttggatacagatcaggtcag

SEQ ID NO: 1813 - DNA, 150 bp, Artificial Sequence
  Synthetic polynucleotide
ctaatacgactcactataggcactgtcaatgtcacttttaccatttaggatagcaaatacttaggtaaatgctgaactgtggatagtgagtgttgaattaaccttttccagatattgatggacagttcagttggatacagatcaggtcag

SEQ ID NO: 1814 - DNA, 150 bp, Artificial Sequence
  Synthetic polynucleotide
ctaatacgactcactataggcactgtgtgccttgccattgaccatctcaggtgctgcttcccattgtccctagggcacgataacattggggtaggtgctcctggttcaaccaaggtcaccctacgttcagttggatacagatcaggtcag

SEQ ID NO: 1815 - DNA, 150 bp, Artificial Sequence
  Synthetic polynucleotide
ctaatacgactcactataggcactgtttagctggagtgaaaacttgaagactcagactcagtggaaacagatgaatgtccacctcgctttcctttggagaggatcttgaggctggaccctctgctctcagttggatacagatcaggtcag

SEQ ID NO: 1816 - DNA, 150 bp, Artificial Sequence
  Synthetic polynucleotide
ctaatacgactcactataggcactgttaaaagggagttagaaagctgctaactaggattaagtttatagtcagggaacagtgttataatctcttcctagctaatgggcttactcaaagattcaccatcagttggatacagatcaggtcag

SEQ ID NO: 1817 - DNA, 150 bp, Artificial Sequence
  Synthetic polynucleotide
ctaatacgactcactataggcactgtctaatcagagtctgagagcacgatgatctcttctggatcgcattgtgtggccacacttgtctgcagggaagtgagagacaaagagtcaaagagatctggatcagttggatacagatcaggtcag

SEQ ID NO: 1818 - DNA, 150 bp, Artificial Sequence
  Synthetic polynucleotide
ctaatacgactcactataggcactgtcaagaagtggaggaggaggaagaggagaaattgctgttcttattcttcataaacattatcattaatgtaatgagtcattgaagatttttaaagctgaggatcagttggatacagatcaggtcag

SEQ ID NO: 1819 - DNA, 150 bp, Artificial Sequence
  Synthetic polynucleotide
ctaatacgactcactataggcactgtctctcaggcctccctgcatggtccagggcccgcaaagctgttttctcacgtgccaccgaagtggttccctaacatacagctccgagctcctccctgcctgtcagttggatacagatcaggtcag

SEQ ID NO: 1820 - DNA, 150 bp, Artificial Sequence
  Synthetic polynucleotide
ctaatacgactcactataggcactgttcaagacaagacaaaatgaagtggctgttgctgatatttggagtcttcttaagtcactggcaagatttaaattatttccagaaaataacaatctttatggtcagttggatacagatcaggtcag

SEQ ID NO: 1821 - DNA, 150 bp, Artificial Sequence
  Synthetic polynucleotide
ctaatacgactcactataggcactgtcccagtgcacgtctgcgggcccatgctccctgacctgagggacaccccagcccgacatccgaacacctccgctgcagcccaggcctgatgtccccttgactcagttggatacagatcaggtcag

SEQ ID NO: 1822 - DNA, 150 bp, Artificial Sequence
  Synthetic polynucleotide
ctaatacgactcactataggcactgtcgaagagggggtgttccagggtaacattgaggctcccacaggagatgcagatgtctggaaagcagagggaggggatggggtgagtaccaccgaagggccttcagttggatacagatcaggtcag

SEQ ID NO: 1823 - DNA, 150 bp, Artificial Sequence
  Synthetic polynucleotide
ctaatacgactcactataggcactgtatttcagaagttcatggaactacctttttccttgagtgcaccaacggaggaacacttcagtcagcctctcaaccttagttccctcctttataaacaggcttcagttggatacagatcaggtcag

SEQ ID NO: 1824 - DNA, 150 bp, Artificial Sequence
  Synthetic polynucleotide
ctaatacgactcactataggcactgtggactccaggtggcagaataagaggcaatggatgggtggaagcgaaacagggccaaagtttgacttcatgtgcaacttcctaaggagtgatttgaactcctcagttggatacagatcaggtcag

SEQ ID NO: 1825 - DNA, 150 bp, Artificial Sequence
  Synthetic polynucleotide
ctaatacgactcactataggcactgtggatgttattaactggaggagggaaagacagaaaaataattctgtgggatcatgatctgaatcctgaaagagaaatagaggtaaggatggaaacggaatatcagttggatacagatcaggtcag

SEQ ID NO: 1826 - DNA, 150 bp, Artificial Sequence
  Synthetic polynucleotide
ctaatacgactcactataggcactgttgagattaattcattcactcataatgctaagagtttatcttagttacttttctaaattttgtaatgagggttaactttacccccctccccaaatcaagattcagttggatacagatcaggtcag

SEQ ID NO: 1827 - DNA, 150 bp, Artificial Sequence
  Synthetic polynucleotide
ctaatacgactcactataggcactgtcccacttcccatcaaaaccagataccttacagaatgaagaaagggacactgaaatgacagccagtggtgtcatctgagctgcctattagagtataataagtcagttggatacagatcaggtcag

SEQ ID NO: 1828 - DNA, 150 bp, Artificial Sequence
  Synthetic polynucleotide
ctaatacgactcactataggcactgtatccctctcccacttacagcagaagaaagggctggtgagaaaggtggattacaggcccacttctgccactgacgagccctatgaatgtggcctacacccctcagttggatacagatcaggtcag

SEQ ID NO: 1829 - DNA, 150 bp, Artificial Sequence
  Synthetic polynucleotide
ctaatacgactcactataggcactgtggagcacagaactagagtgagggaagcagaaagaagagagaggctgtgattcaagaatcactcccagctggccgggcgcagtggctcacacctgtaatcctcagttggatacagatcaggtcag

SEQ ID NO: 1830 - DNA, 150 bp, Artificial Sequence
  Synthetic polynucleotide
ctaatacgactcactataggcactgtcctctgagaccctagttacagaagttcccaccaccctcgcagacctttgggcctagagaatacagagagaccgtttaaaccaaagtggaccccaaaaggctcagttggatacagatcaggtcag

SEQ ID NO: 1831 - DNA, 150 bp, Artificial Sequence
  Synthetic polynucleotide
ctaatacgactcactataggcactgttgaacaatttaagacgtatgattcatttatttctagaaatggccatctaatatcttcagacagcagatgaaactgccagaaaccatggaaagtggaatcgtcagttggatacagatcaggtcag

SEQ ID NO: 1832 - DNA, 150 bp, Artificial Sequence
  Synthetic polynucleotide
ctaatacgactcactataggcactgtttagatttcaaatgagtacaagtgggaggaaagcttggataattctctggaaataatcgaacagagtgaaggagaggggtctacaggtgagctgaatgcttcagttggatacagatcaggtcag

SEQ ID NO: 1833 - DNA, 150 bp, Artificial Sequence
  Synthetic polynucleotide
ctaatacgactcactataggcactgtatgatgaaatgatttgtttataaatttaattgcaaaacttatttggttattcatgagttgaacatgtacctgcttgtaatgggggatgtggaaaatcaactcagttggatacagatcaggtcag

SEQ ID NO: 1834 - DNA, 150 bp, Artificial Sequence
  Synthetic polynucleotide
ctaatacgactcactataggcactgtttacgtaggcactagtaatagctttcaactttaaattccatgtgcacttcttggatatgccaaaaaatatttgtcaatgaaggagactgcaatgaaggaatcagttggatacagatcaggtcag

SEQ ID NO: 1835 - DNA, 150 bp, Artificial Sequence
  Synthetic polynucleotide
ctaatacgactcactataggcactgtgcggctttgattgagtctgactgtcatgaaagatttctctgtagcattcaatactgtttgagagcattttacacatagtagaatgtcattcaaaactggatcagttggatacagatcaggtcag

SEQ ID NO: 1836 - DNA, 150 bp, Artificial Sequence
  Synthetic polynucleotide
ctaatacgactcactataggcactgtatgaaatcttcaaactggagtaatggctaactattatcatttctggtacagtgagcaatgctgttttgttctgctgctcttcattctcatttctcctttgtcagttggatacagatcaggtcag

SEQ ID NO: 1837 - DNA, 150 bp, Artificial Sequence
  Synthetic polynucleotide
ctaatacgactcactataggcactgtatatcaaaaactatacatacacacttatataataaatgcatacacacatctatactgtacatgtgtatatacataaatgcatacacacatctatactgtatcagttggatacagatcaggtcag

SEQ ID NO: 1838 - DNA, 150 bp, Artificial Sequence
  Synthetic polynucleotide
ctaatacgactcactataggcactgtttagcctcccgagtagctgggattacaggcgcccaccaccacgcccaggtaattttttgtattttttgtagagatggggtttatgccatgttgcccaagctcagttggatacagatcaggtcag

SEQ ID NO: 1839 - DNA, 150 bp, Artificial Sequence
  Synthetic polynucleotide
ctaatacgactcactataggcactgtaaaaattatccaggcctgtagtcccagctactcaggaggttggaggaccccttcagcccaggagtccgagggtacagtgagccacgtttgacaatgcagttcagttggatacagatcaggtcag

SEQ ID NO: 1840 - DNA, 150 bp, Artificial Sequence
  Synthetic polynucleotide
ctaatacgactcactataggcactgttccgggcagagcaccctggaggggaggggaggggacacacggcccagctctgagaaagccccggggaggggacaagatgtggaggctcctgggaacctcatcagttggatacagatcaggtcag

SEQ ID NO: 1841 - DNA, 150 bp, Artificial Sequence
  Synthetic polynucleotide
ctaatacgactcactataggcactgtcaggctctgtgtcaggttctggaactacaaggatagaatgagttgttcttgtccttaagaaacttacagtctactggaggataaaagtacacaaacagattcagttggatacagatcaggtcag

SEQ ID NO: 1842 - DNA, 150 bp, Artificial Sequence
  Synthetic polynucleotide
ctaatacgactcactataggcactgtacatgaggttgttgatggagaacgggtggttgaaggagtagtgggggtcccctttcaggtgcagctgggactcgtggggtgccaagccgtgtgccgggtgtcagttggatacagatcaggtcag

SEQ ID NO: 1843 - DNA, 150 bp, Artificial Sequence
  Synthetic polynucleotide
ctaatacgactcactataggcactgtagggaggctgcggtagcggccacgagttgttgaggaagccagactgcaggtacttggggggcgccaggtagccgtagccgtcggccccggcgcccgccactcagttggatacagatcaggtcag

SEQ ID NO: 1844 - DNA, 150 bp, Artificial Sequence
  Synthetic polynucleotide
ctaatacgactcactataggcactgtcacctcaggaactgaagactggggggagaaaagcctatcaaactacaaaaatctgacatattaaagtgtatctgacagtgaccacaaagctatgcccaaatcagttggatacagatcaggtcag

SEQ ID NO: 1845 - DNA, 150 bp, Artificial Sequence
  Synthetic polynucleotide
ctaatacgactcactataggcactgtgcctctatcacaagatgaatgggcagaacaggcccctcatccggcccaagaagcgcctggtaagaccacagacctgcttcaccttatacacaggaacccctcagttggatacagatcaggtcag

SEQ ID NO: 1846 - DNA, 150 bp, Artificial Sequence
  Synthetic polynucleotide
ctaatacgactcactataggcactgtgcaggatcactggctggcatcgtgttccccaggaagttattcttgatttagtttaaactaaatgaggagtacagcctggcaagagaaggtggttcctgcatcagttggatacagatcaggtcag

SEQ ID NO: 1847 - DNA, 150 bp, Artificial Sequence
  Synthetic polynucleotide
ctaatacgactcactataggcactgtgccggctctcttatcaggctggctgggattaagtccgagtcagggaactcagggccattgaaggaaacccataaatcaagtcaggttctagagagagacctcagttggatacagatcaggtcag

SEQ ID NO: 1848 - DNA, 150 bp, Artificial Sequence
  Synthetic polynucleotide
ctaatacgactcactataggcactgtactcacaagttggctccctctagtggctgttggtgggaggcctcagttcctcaccacgtgggcctctccgtgaagctgcttgagggtcctcacagcgtggtcagttggatacagatcaggtcag

SEQ ID NO: 1849 - DNA, 150 bp, Artificial Sequence
  Synthetic polynucleotide
ctaatacgactcactataggcactgtagttgctataatagatgtttacatgaagttcagtgaggacacagacaattgtgtttcagtctaatattcctagaaagaaagaagcaaccatacttgatgatcagttggatacagatcaggtcag

SEQ ID NO: 1850 - DNA, 150 bp, Artificial Sequence
  Synthetic polynucleotide
ctaatacgactcactataggcactgtgggaagggcttggaatctttcaaattcagtacttcccagggatagttttccttttgattaaagttttgttcttatgttactttttactgttgtttttgcatcagttggatacagatcaggtcag

SEQ ID NO: 1851 - DNA, 150 bp, Artificial Sequence
  Synthetic polynucleotide
ctaatacgactcactataggcactgtgaggcatcacgctacctgacttcaaactatgctacaaggctacagtaaccaaaacagcatggtactggtaccaaaacagaacagaacagagccctcagaatcagttggatacagatcaggtcag

SEQ ID NO: 1852 - DNA, 150 bp, Artificial Sequence
  Synthetic polynucleotide
ctaatacgactcactataggcactgtgtggggagggggcatccagaatctaagtacattccattggaggattttcaaggctgctgttgctgtgctgggcttttgctttatgtatgagaaagataggtcagttggatacagatcaggtcag

SEQ ID NO: 1853 - DNA, 150 bp, Artificial Sequence
  Synthetic polynucleotide
ctaatacgactcactataggcactgtctgccgcacaaagccggccaccgccgggccattgttcccccgcccgacctacctgtagcgatgaggcttcttcaccccgccggtagagggagcgcttttctcagttggatacagatcaggtcag

SEQ ID NO: 1854 - DNA, 150 bp, Artificial Sequence
  Synthetic polynucleotide
ctaatacgactcactataggcactgtttaaaattattgcaagagctactgcctaacctagacctgagcacatgttttaggctcaaagatagtcaggaacatgggaagaaactagcttaatataaactcagttggatacagatcaggtcag

SEQ ID NO: 1855 - DNA, 150 bp, Artificial Sequence
  Synthetic polynucleotide
ctaatacgactcactataggcactgttggaagctgaggcagagagtgtagagagaggccattgggggagatggacagagaagctgggagaagcagaacggaggagccaggggggcgggggctcagatcagttggatacagatcaggtcag

SEQ ID NO: 1856 - DNA, 150 bp, Artificial Sequence
  Synthetic polynucleotide
ctaatacgactcactataggcactgttagaaggcatcctccactccctgggaaaggagggatgggatcaggagggaccggcctgtggccgcctgcctgggtgaggggctccctgctgtgggatcaatcagttggatacagatcaggtcag

SEQ ID NO: 1857 - DNA, 150 bp, Artificial Sequence
  Synthetic polynucleotide
ctaatacgactcactataggcactgtcaattcccaacatctattttaaactttaggggtgtactcaatcctcagttattgagaaaaacttaaatttcaaatactgaatgaaaattcttataatctctcagttggatacagatcaggtcag

SEQ ID NO: 1858 - DNA, 150 bp, Artificial Sequence
  Synthetic polynucleotide
ctaatacgactcactataggcactgtgcactgtggaaggctgaggcgggtggatcacgaggtcagaagatcgagaccatcctggctaacacagtgaaaccctgactctactaaaaatacaaaaaattcagttggatacagatcaggtcag

SEQ ID NO: 1859 - DNA, 150 bp, Artificial Sequence
  Synthetic polynucleotide
ctaatacgactcactataggcactgtcttcggtgtgtgtgtcaagggcaccctcagtggctgtgcgggaccattctctagagcatgcttccctgtggggtcacttccagcaaatcatcactgagcttcagttggatacagatcaggtcag

SEQ ID NO: 1860 - DNA, 150 bp, Artificial Sequence
  Synthetic polynucleotide
ctaatacgactcactataggcactgtttctggcaaggcttttcttctctgagcctcactttcctcttttgaaggtggcaatagtaactgaacctgcatcacagaatggccttgagggttagatggatcagttggatacagatcaggtcag

SEQ ID NO: 1861 - DNA, 150 bp, Artificial Sequence
  Synthetic polynucleotide
ctaatacgactcactataggcactgtccaatagcatggtccttcatccagtggagaatctctactaagttactctctgatactgggtcagaccttacaattccctagacatcactttattctttggtcagttggatacagatcaggtcag

SEQ ID NO: 1862 - DNA, 150 bp, Artificial Sequence
  Synthetic polynucleotide
ctaatacgactcactataggcactgtcactcacccacccacatacctatgaacagagttaaagtcaaacatacatcaatgtgcatatgatactattccactgcatacaggaactcctacctgaatctcagttggatacagatcaggtcag

SEQ ID NO: 1863 - DNA, 150 bp, Artificial Sequence
  Synthetic polynucleotide
ctaatacgactcactataggcactgtcccccaaacaagaaaagtcatacagggcagacagcagtcacagttctcttcaccaaattcatttgcttggtctattagctcccctggtgaggagagattctcagttggatacagatcaggtcag

SEQ ID NO: 1864 - DNA, 150 bp, Artificial Sequence
  Synthetic polynucleotide
ctaatacgactcactataggcactgtactgaattttgttatcttagataatttctctaattggatgttctaaatttagattctaaattgatcaatttttgtgcactgatgtgtcctatttaagctatcagttggatacagatcaggtcag

SEQ ID NO: 1865 - DNA, 150 bp, Artificial Sequence
  Synthetic polynucleotide
ctaatacgactcactataggcactgtcacacgccgtggagcagcacgagatgccggtacgacacttggctcatcaagctcgctgcttccaggaatgactggggaaggtgggaagggagagaagatgtcagttggatacagatcaggtcag

SEQ ID NO: 1866 - DNA, 150 bp, Artificial Sequence
  Synthetic polynucleotide
ctaatacgactcactataggcactgtatggctggcgattctaggaatgccatgaaccaggacatggagattggagtcactccctgggaccccaagaagattccaaaacaggcccgcgattatgtcctcagttggatacagatcaggtcag

SEQ ID NO: 1867 - DNA, 150 bp, Artificial Sequence
  Synthetic polynucleotide
ctaatacgactcactataggcactgtttctcaggtatgaattgataagaaatatcacattgaataaatatatattaggtactgggcatgtagatattacaaagatgagtaaggatccttagtttgctcagttggatacagatcaggtcag

SEQ ID NO: 1868 - DNA, 150 bp, Artificial Sequence
  Synthetic polynucleotide
ctaatacgactcactataggcactgtcgggatttgttttttgaatgaatgcacggaaatcagaaacaaggggctctcattggtttagtgctctttgttggtttcccccttccgtatgaagctgaagtcagttggatacagatcaggtcag

SEQ ID NO: 1869 - DNA, 150 bp, Artificial Sequence
  Synthetic polynucleotide
ctaatacgactcactataggcactgtttttttgagatggagtgcaatggtgagagcatggctcactgcaacctccacctcctgggttcaagcagttattcagcctcagcctcacaagtagctgggatcagttggatacagatcaggtcag

SEQ ID NO: 1870 - DNA, 150 bp, Artificial Sequence
  Synthetic polynucleotide
ctaatacgactcactataggcactgtggaatggccattatcctaaagccatatgaagaataaggacagatttctcaatagacatactggaaacttttgttatttaaattctggaagatagagtaagtcagttggatacagatcaggtcag

SEQ ID NO: 1871 - DNA, 150 bp, Artificial Sequence
  Synthetic polynucleotide
ctaatacgactcactataggcactgtcacacagggctccccagcccgagctacaaatccccgggactgaccttggtaatggagcggcgggacttgcggctgcatctgatcgggcaggaaggatgggtcagttggatacagatcaggtcag

SEQ ID NO: 1872 - DNA, 150 bp, Artificial Sequence
  Synthetic polynucleotide
ctaatacgactcactataggcactgtcaaaaggacagtaagaagctttatttccatcataattttcttaaattcatccttccatgactgaaaacatatggcaacaatggttggaatgtaggaactatcagttggatacagatcaggtcag

SEQ ID NO: 1873 - DNA, 150 bp, Artificial Sequence
  Synthetic polynucleotide
ctaatacgactcactataggcactgttgtcgcaccatgaaaccaccaatgcctatgaggaggcagagttgtggatgagaagccgctgggggacctattgagctgccccgcaccaccccaccacccctcagttggatacagatcaggtcag

SEQ ID NO: 1874 - DNA, 150 bp, Artificial Sequence
  Synthetic polynucleotide
ctaatacgactcactataggcactgtgcctagtctaagggtttaaagaaaggtttttagagagtaggagactggggaatcatgagagtgttagctaattagtaagactagggataaaaatactggctcagttggatacagatcaggtcag

SEQ ID NO: 1875 - DNA, 150 bp, Artificial Sequence
  Synthetic polynucleotide
ctaatacgactcactataggcactgtgtatacaaaatttccaaatttcatacacagtctatgctatttcttgtcagagttttaaaaaattttttaaattgtttttgatgctctaaaaaggctgttttcagttggatacagatcaggtcag

SEQ ID NO: 1876 - DNA, 150 bp, Artificial Sequence
  Synthetic polynucleotide
ctaatacgactcactataggcactgtcaggaaggtagtgccgtggggccccaaggccagaatcccaggctgtacctgctcagggaccctcctacccccaggcacatctctgatccaggacatgaagtcagttggatacagatcaggtcag

SEQ ID NO: 1877 - DNA, 150 bp, Artificial Sequence
  Synthetic polynucleotide
ctaatacgactcactataggcactgtaatactcctataaaacggtctcttttgccttgttttattttggtaactaagtgaatgctgggttagccataaaggtagcttgctgcatttctatttcttgtcagttggatacagatcaggtcag

SEQ ID NO: 1878 - DNA, 150 bp, Artificial Sequence
  Synthetic polynucleotide
ctaatacgactcactataggcactgtcgggacagaaagcaaaaaacagaggagaccctcccttccccacaggaagacgcactcggggtaggagagggaaagaaacccagaaaggggcagcggcgtgtcagttggatacagatcaggtcag

SEQ ID NO: 1879 - DNA, 150 bp, Artificial Sequence
  Synthetic polynucleotide
ctaatacgactcactataggcactgtttaaaatggttagaatagaatctataattgattcagaaaaacattgagccatttgtaaaatacttgttacaagaaatagttagaaagtatatgttgtaggtcagttggatacagatcaggtcag

SEQ ID NO: 1880 - DNA, 150 bp, Artificial Sequence
  Synthetic polynucleotide
ctaatacgactcactataggcactgtattgctgcagttaattctatccttggttgacctagtagggccaggaggatgtgtgactaaaatgaaatgctgcagagaccaattatcatctttccaaagatcagttggatacagatcaggtcag

SEQ ID NO: 1881 - DNA, 150 bp, Artificial Sequence
  Synthetic polynucleotide
ctaatacgactcactataggcactgttcacggcacctatgaaacagcgctggcagctcgctttttaaagaggaagaggttgagagcttatagacatttccttcattcactgtcagtaggacatatttcagttggatacagatcaggtcag

SEQ ID NO: 1882 - DNA, 150 bp, Artificial Sequence
  Synthetic polynucleotide
ctaatacgactcactataggcactgtcccccatctgagatagggagggctgaggtacccgggaggtactacaaccttgattatttagtggggcagagatgagaagttaatgggtctgaggttttgttcagttggatacagatcaggtcag

SEQ ID NO: 1883 - DNA, 150 bp, Artificial Sequence
  Synthetic polynucleotide
ctaatacgactcactataggcactgtcctctttccttttataaagccaatccatagccaggacgtaccatccctacctccacccctcagctgagggagggagtctggccatgaaactgaaggcacatcagttggatacagatcaggtcag

SEQ ID NO: 1884 - DNA, 150 bp, Artificial Sequence
  Synthetic polynucleotide
ctaatacgactcactataggcactgtatttttgtcctttctgtaggctggatgaaaaattcacagtcaaggttgctgattttggtcttgccagagacatgtatgataaagaatactatagtgtacatcagttggatacagatcaggtcag

SEQ ID NO: 1885 - DNA, 150 bp, Artificial Sequence
  Synthetic polynucleotide
ctaatacgactcactataggcactgttgctgatgtaatttctgcccctttgcccttcagttggggtattgctttggaccgattagagggctgtggctgggatgctaaaggttcatgtttccttagctcagttggatacagatcaggtcag

SEQ ID NO: 1886 - DNA, 150 bp, Artificial Sequence
  Synthetic polynucleotide
ctaatacgactcactataggcactgttttatttctttatatatcttccctattataccttacttggtcatctttaaatccttagcacagtgcctgccaaaaagcaggcccttaaataaatgttatttcagttggatacagatcaggtcag

SEQ ID NO: 1887 - DNA, 150 bp, Artificial Sequence
  Synthetic polynucleotide
ctaatacgactcactataggcactgttagctattcacaatgggaaaggatgtagcaacacattttaaccctatgttgagttttaggtgggttcctttgaaattttgttaaggctaacttttgttaatcagttggatacagatcaggtcag

SEQ ID NO: 1888 - DNA, 150 bp, Artificial Sequence
  Synthetic polynucleotide
ctaatacgactcactataggcactgtatcataagttgaactgtcttacattatggttttccaaattttgatttgtttttaaatactctttccttgcctggcaggtaggcacaacttacgtaacagatcagttggatacagatcaggtcag

SEQ ID NO: 1889 - DNA, 150 bp, Artificial Sequence
  Synthetic polynucleotide
ctaatacgactcactataggcactgtgcaggggttaagagtaaggcagtttgggcttaagtctgcctacagtgtcagaggagggggaaaagtgatcacccgggaagatgaggttggggttctagaatcagttggatacagatcaggtcag

SEQ ID NO: 1890 - DNA, 150 bp, Artificial Sequence
  Synthetic polynucleotide
ctaatacgactcactataggcactgttgctctggcaagagaatgagggaatgtgtaggtggggcctctggattgtcagccttccctccccaaggactgtggatgcagtaccaaagaactgctgaagtcagttggatacagatcaggtcag

SEQ ID NO: 1891 - DNA, 150 bp, Artificial Sequence
  Synthetic polynucleotide
ctaatacgactcactataggcactgtgcggggagctggccttgcgggaggtttgggccaggatccttcccgagagagaggacccccttgtcctgggcagctgtcactggggtagcctgttttggaatcagttggatacagatcaggtcag

SEQ ID NO: 1892 - DNA, 150 bp, Artificial Sequence
  Synthetic polynucleotide
ctaatacgactcactataggcactgtatttcttagaaatttagttcaatctacttgcattctaattttagataagtcagccctgctcaaaattctgtgagtggcaccaaatgtagtgcacgttaaatcagttggatacagatcaggtcag

SEQ ID NO: 1893 - DNA, 150 bp, Artificial Sequence
  Synthetic polynucleotide
ctaatacgactcactataggcactgtctgatcacaatataaatcacacaagctgtaataacagaaatcaaaaatcagaaattacaacacatctgtctgattctaatttatggcagccaagtccctttcagttggatacagatcaggtcag

SEQ ID NO: 1894 - DNA, 150 bp, Artificial Sequence
  Synthetic polynucleotide
ctaatacgactcactataggcactgttagtaatcactgatgatcactgcctggattccacttcattgggggctgcaaaatgaaacgttttctattctgtcattcattctttattttaaaattgtgatcagttggatacagatcaggtcag

SEQ ID NO: 1895 - DNA, 150 bp, Artificial Sequence
  Synthetic polynucleotide
ctaatacgactcactataggcactgtcaagaaattgtgagacgtacaaagaaacaggaaaatatgacacatacactggaaaaaagctggcagcagcaactgcctgtgagacaaggggccaaattaatcagttggatacagatcaggtcag

SEQ ID NO: 1896 - DNA, 150 bp, Artificial Sequence
  Synthetic polynucleotide
ctaatacgactcactataggcactgtgtgcagatgctattcaattaccatgattattgcaaaggtcatctgaagaatggatagaagtgagaggccttaggtgctgggagggtactacctgttccaatcagttggatacagatcaggtcag

SEQ ID NO: 1897 - DNA, 150 bp, Artificial Sequence
  Synthetic polynucleotide
ctaatacgactcactataggcactgtacagagggaggaaagtgccccctgctctctggggactcgctggggagcccggacatttctcccctccacacacacacccaatctggacacaacacctgcttcagttggatacagatcaggtcag

SEQ ID NO: 1898 - DNA, 150 bp, Artificial Sequence
  Synthetic polynucleotide
ctaatacgactcactataggcactgtaggggggagcactcaggatccctcccaggggcaatgggtgcagggtgggtggagaggggagcactcaggatccctcctggggcaatgggtgcagggtgggtcagttggatacagatcaggtcag

SEQ ID NO: 1899 - DNA, 150 bp, Artificial Sequence
  Synthetic polynucleotide
ctaatacgactcactataggcactgttcgtcccacctcggcctcccaaaatgttgagattacaggtatgagccactgtgcccatactctgcaataatgtttattaataataattacagaggaacagtcagttggatacagatcaggtcag

SEQ ID NO: 1900 - DNA, 150 bp, Artificial Sequence
  Synthetic polynucleotide
ctaatacgactcactataggcactgtattttgaaatggaaattgtgaggtttattttactaggttattggaggcagttaagtttcttaatgctatacctgattctgccaaagtcccttggacattttcagttggatacagatcaggtcag

SEQ ID NO: 1901 - DNA, 150 bp, Artificial Sequence
  Synthetic polynucleotide
ctaatacgactcactataggcactgtttacatcaccacacatggcaatcccatacaaccctgagtcccatcatcactgctgttgagttttttcattcggtactggcgtatttctcttaccagtgtgtcagttggatacagatcaggtcag

SEQ ID NO: 1902 - DNA, 150 bp, Artificial Sequence
  Synthetic polynucleotide
ctaatacgactcactataggcactgtagccactgccaatttcatcacaaatctgccattaagctggctttactcaactgtttataactccaacatactatgtacctatacccatggaactccttgatcagttggatacagatcaggtcag

SEQ ID NO: 1903 - DNA, 150 bp, Artificial Sequence
  Synthetic polynucleotide
ctaatacgactcactataggcactgtagctgggattacaggcaccgccaccatgcctggctaattttttgtattttcagtagagatggggtttcactatgttggtcagactggtctcgaactcctgtcagttggatacagatcaggtcag

SEQ ID NO: 1904 - DNA, 150 bp, Artificial Sequence
  Synthetic polynucleotide
ctaatacgactcactataggcactgtaggtgaagcagcaagtgctgatgtagaagctaagatcaagctaagatcattgatggaggtgactacactaaacaacagattttcaatatagaccactctttcagttggatacagatcaggtcag

SEQ ID NO: 1905 - DNA, 150 bp, Artificial Sequence
  Synthetic polynucleotide
ctaatacgactcactataggcactgttccaaagcatcatttggtaccctgcaaaaccctatcactggtaggtccaacactggtacaagcaaatttaacaagtttccaaccacattttaccatttggtcagttggatacagatcaggtcag

SEQ ID NO: 1906 - DNA, 150 bp, Artificial Sequence
  Synthetic polynucleotide
ctaatacgactcactataggcactgtgacaagttgcagaatcctcaggaggtccacgtggttttgaaaatgcttcccagatgattctaatatgttccccctggggctgggagagggatgtgcatgttcagttggatacagatcaggtcag

SEQ ID NO: 1907 - DNA, 150 bp, Artificial Sequence
  Synthetic polynucleotide
ctaatacgactcactataggcactgttcatttccctccaatttccaagacatctgaaataatctattcagtaactacttagatttagtctgttaaatctagtaaaaatttaatgagtacttttcagtcagttggatacagatcaggtcag

SEQ ID NO: 1908 - DNA, 150 bp, Artificial Sequence
  Synthetic polynucleotide
ctaatacgactcactataggcactgttgaggactccaaggtcaggtcatacggcagccgctacctacacccgcgcgagagagttgccgagagaagctgcgggaagaaaccgaggaaatttgttatctcagttggatacagatcaggtcag

SEQ ID NO: 1909 - DNA, 150 bp, Artificial Sequence
  Synthetic polynucleotide
ctaatacgactcactataggcactgtaaagtgactatataacagggattgcatgcaaatatctcatgcttgctttggttcatattttctatttataattaaaatacatgtaatttcaaatggggaatcagttggatacagatcaggtcag

SEQ ID NO: 1910 - DNA, 150 bp, Artificial Sequence
  Synthetic polynucleotide
ctaatacgactcactataggcactgtttaaaccagaccttatccagctgagaaagacgagagaccaatacttgatgtaagtatttgaaatggaatcctatacatgaataattggtgattgctacaatcagttggatacagatcaggtcag

SEQ ID NO: 1911 - DNA, 150 bp, Artificial Sequence
  Synthetic polynucleotide
ctaatacgactcactataggcactgttctaagtgcctagcccaggacgctatctggagagatcttgtctttgaggaagtgctctaatgccacagcctcgatgtggtagggcctgcctctgctgtcatcagttggatacagatcaggtcag

SEQ ID NO: 1912 - DNA, 150 bp, Artificial Sequence
  Synthetic polynucleotide
ctaatacgactcactataggcactgtggccctgggcctccttcccactccctctccacatggcttggtgcatcttgctctgtgtgcctcagccgattgcctgcaggggcagcctaggcctggtccttcagttggatacagatcaggtcag

SEQ ID NO: 1913 - DNA, 150 bp, Artificial Sequence
  Synthetic polynucleotide
ctaatacgactcactataggcactgttcctgggctcaagctatcctcccgcctctgcctccctgagagctgggattacaggtgtgagccactgcgcctggcctgtttctttttaagtgtcaatttctcagttggatacagatcaggtcag

SEQ ID NO: 1914 - DNA, 150 bp, Artificial Sequence
  Synthetic polynucleotide
ctaatacgactcactataggcactgtaagtttttgtttaataaagacaacatttgggctaccatggagttggtttggaatgtgtatgattttttcttttttcttgactaagggtaacactttgttgtcagttggatacagatcaggtcag

SEQ ID NO: 1915 - DNA, 150 bp, Artificial Sequence
  Synthetic polynucleotide
ctaatacgactcactataggcactgtcacattacattcatttggttatactgcctattccagtaatctcaaaattttccactttgaatctaccctaattcctctctgaacaggaattttggcttattcagttggatacagatcaggtcag

SEQ ID NO: 1916 - DNA, 150 bp, Artificial Sequence
  Synthetic polynucleotide
ctaatacgactcactataggcactgttccatgcctctctggaagttaggacttctggtggctccagcaattccttgtgttcctgggcttgtggatgcatctcctggtctctccacccatcttcacatcagttggatacagatcaggtcag

SEQ ID NO: 1917 - DNA, 150 bp, Artificial Sequence
  Synthetic polynucleotide
ctaatacgactcactataggcactgtctagttttttgacttcattatgatgctggagcacttcccaatataaggggtgtgtgtgtgtgtgtgtgtgtgttttaattgaaaacagttgaaagttcaatcagttggatacagatcaggtcag

SEQ ID NO: 1918 - DNA, 150 bp, Artificial Sequence
  Synthetic polynucleotide
ctaatacgactcactataggcactgttggaagatctgacccgaatcaatgaagaaatcgagaagtttgacatcagtgacaatgctgaccggctcgaggacgtggaggatgacatcagtgtgatctctcagttggatacagatcaggtcag

SEQ ID NO: 1919 - DNA, 150 bp, Artificial Sequence
  Synthetic polynucleotide
ctaatacgactcactataggcactgtctctttttcccttgtagctggaaaagactgtcatggttattgaattagtgtctcccaattgactgtcttctactgggcccgtattactactcagcatttttcagttggatacagatcaggtcag

SEQ ID NO: 1920 - DNA, 150 bp, Artificial Sequence
  Synthetic polynucleotide
ctaatacgactcactataggcactgtttagccagatgtgatggcacatgcctgtaatcccagctactcgggaggctgaggcagaagaattgcttgaacccaggagtcagaggttgtggtgagctgatcagttggatacagatcaggtcag

SEQ ID NO: 1921 - DNA, 150 bp, Artificial Sequence
  Synthetic polynucleotide
ctaatacgactcactataggcactgtaagaaatgaatcatttcttttggtatatgattatctaattgtataatagaaataatttgctttattttccattggtttttatagtttcttataatcagtatcagttggatacagatcaggtcag

SEQ ID NO: 1922 - DNA, 150 bp, Artificial Sequence
  Synthetic polynucleotide
ctaatacgactcactataggcactgtataaataaaaaggtgtcagcaacaattcccatggtggctcagcccccaacgtgctgtgtgacacaaaacaactaagagtacaaagtcacaagaagcagcttcagttggatacagatcaggtcag

SEQ ID NO: 1923 - DNA, 150 bp, Artificial Sequence
  Synthetic polynucleotide
ctaatacgactcactataggcactgtgctcttggacttcccagtctccagaaccgtgagccaaatacatttctgttcattctaaactacctgttttgtggtattctagtaaagcaacataaaattttcagttggatacagatcaggtcag

SEQ ID NO: 1924 - DNA, 150 bp, Artificial Sequence
  Synthetic polynucleotide
ctaatacgactcactataggcactgtaaccctacacagcctgtgactcacgcacacacacagtgggtgcccaatcactgatgagaaacgcgggatctcaggagcgtgaccctcctcagcctgagcttcagttggatacagatcaggtcag

SEQ ID NO: 1925 - DNA, 150 bp, Artificial Sequence
  Synthetic polynucleotide
ctaatacgactcactataggcactgttcctttgaaaggtcagggtaatactactactaatagctaacatttgcttagttctgaccacagccctatcagatggctactattatccccattgtaaagatcagttggatacagatcaggtcag

SEQ ID NO: 1926 - DNA, 150 bp, Artificial Sequence
  Synthetic polynucleotide
ctaatacgactcactataggcactgtctaagcctggagatatctttgaggttgaactggctaaaaatgataacagcttggggataagtgtcacggtactgtttgacaaggttttcaaatgttttcttcagttggatacagatcaggtcag

SEQ ID NO: 1927 - DNA, 150 bp, Artificial Sequence
  Synthetic polynucleotide
ctaatacgactcactataggcactgtccaaaattttaagagaatccatacatttgggttttaatgtgaatttttgatttttaatgctggtgaaatgatctggatgttttcacaaacactacatgagtcagttggatacagatcaggtcag

SEQ ID NO: 1928 - DNA, 150 bp, Artificial Sequence
  Synthetic polynucleotide
ctaatacgactcactataggcactgtggttttttgacttacacttctgccactgttaggattcttaaaattgttttcgccctttccgtggagaaagttttgaagatgctggctgggaggagccggctcagttggatacagatcaggtcag

SEQ ID NO: 1929 - DNA, 150 bp, Artificial Sequence
  Synthetic polynucleotide
ctaatacgactcactataggcactgtctgtatgaataccttcaaatgacttaatggatagatttgcttacttacaggcatcacaggctctgggtcaatttgtccagcttttcgcttaactccctgatcagttggatacagatcaggtcag

SEQ ID NO: 1930 - DNA, 150 bp, Artificial Sequence
  Synthetic polynucleotide
ctaatacgactcactataggcactgtaagactcaagcttaaccctctgcagacctctggagttctctttttgtagctttcttctctctagtattctgtcctgctaattttagtttgccttggcatctcagttggatacagatcaggtcag

SEQ ID NO: 1931 - DNA, 150 bp, Artificial Sequence
  Synthetic polynucleotide
ctaatacgactcactataggcactgtgttcctactagcactgtccagggcgctggaagccaagcccagttctggaagtaacagaggctcagagccaagggtgtgagtgaacggtgagccacgcagctcagttggatacagatcaggtcag

SEQ ID NO: 1932 - DNA, 150 bp, Artificial Sequence
  Synthetic polynucleotide
ctaatacgactcactataggcactgtcttagctcagctccttgggccagcatgaccttaaacaagtggctcaatatcttggagcaaccccagttatcatcattaaggtagggacaaccataacaactcagttggatacagatcaggtcag

SEQ ID NO: 1933 - DNA, 150 bp, Artificial Sequence
  Synthetic polynucleotide
ctaatacgactcactataggcactgttatcaccaggatggctgtggagctgctaataaagaaacagaaaccaatctgggtgactggacagagggtggaggggatagtggggtggtgacaagaatggtcagttggatacagatcaggtcag

SEQ ID NO: 1934 - DNA, 150 bp, Artificial Sequence
  Synthetic polynucleotide
ctaatacgactcactataggcactgtcatgagtaagtcttagcaagctcttccccacaggttaggggaaacactggtgatgggagtagctcttcttgcttttagctgaatgacaaccatcttgccatcagttggatacagatcaggtcag

SEQ ID NO: 1935 - DNA, 150 bp, Artificial Sequence
  Synthetic polynucleotide
ctaatacgactcactataggcactgtcacaattaccggtgctggtccttgaagaaacaaatatggaaattgaaagcgtttaaaaccttttgaaagcaatataacaataattttatacctgttaaattcagttggatacagatcaggtcag

SEQ ID NO: 1936 - DNA, 150 bp, Artificial Sequence
  Synthetic polynucleotide
ctaatacgactcactataggcactgtcggtgggtttgtgaagacagtgatggtcagagtgaagcttttccctgtggggacacgatagagaacaaaacagaatgaggttggtggcctgaacatatcttcagttggatacagatcaggtcag

SEQ ID NO: 1937 - DNA, 150 bp, Artificial Sequence
  Synthetic polynucleotide
ctaatacgactcactataggcactgtgctgaggcggccgcttaattgccctaacttcttggggaggggtaaggcaggtatcatctcttcttcttcatgacctcctactcaactgtggggaaggcattcagttggatacagatcaggtcag

SEQ ID NO: 1938 - DNA, 150 bp, Artificial Sequence
  Synthetic polynucleotide
ctaatacgactcactataggcactgtttaccccactgtattcttgctttataaacttaaacataagacctaaaaccataaaaagcctagaagaaaacctaggcaataccattcaggacataggcattcagttggatacagatcaggtcag

SEQ ID NO: 1939 - DNA, 150 bp, Artificial Sequence
  Synthetic polynucleotide
ctaatacgactcactataggcactgtctttgcaaaaggttatatttgagatagtctaaagacaaaataataaagcctaggaatactaagagagcatttaaatcctaaatacctaaaatggtatacttcagttggatacagatcaggtcag

SEQ ID NO: 1940 - DNA, 150 bp, Artificial Sequence
  Synthetic polynucleotide
ctaatacgactcactataggcactgttatttttgtgcctcagcctccccagtagctgggatcaccgtcacgtgccaccactcccagctaataaataggttgccttttatttctggctccttttgcctcagttggatacagatcaggtcag

SEQ ID NO: 1941 - DNA, 150 bp, Artificial Sequence
  Synthetic polynucleotide
ctaatacgactcactataggcactgtttcagcagaatttatcctggctctggttttccaccaagacaagaaagggagcaagatcttcggcccctagtcttggaagcgaacaaaggaaaacctaacctcagttggatacagatcaggtcag

SEQ ID NO: 1942 - DNA, 150 bp, Artificial Sequence
  Synthetic polynucleotide
ctaatacgactcactataggcactgtaggtcattctagggaagttccagccccagtcccgaccccatcacactttggcctggagctaaggctggggggaaatgccgggaagcaccaccagcaagaatcagttggatacagatcaggtcag

SEQ ID NO: 1943 - DNA, 150 bp, Artificial Sequence
  Synthetic polynucleotide
ctaatacgactcactataggcactgtgatggtagttagaggttctgttacaatcttccaaaagtcttcatttttgtttcaccagacaactaacctggttgcattcaaaccacaaactctgtcctggtcagttggatacagatcaggtcag

SEQ ID NO: 1944 - DNA, 150 bp, Artificial Sequence
  Synthetic polynucleotide
ctaatacgactcactataggcactgtccagtggtgtgtgtgagagagcaagcagcactaagaaaagccactgctgagagttcacagtccttgcttcagtgttgtcttacgctcggggtgccttaaatcagttggatacagatcaggtcag

SEQ ID NO: 1945 - DNA, 150 bp, Artificial Sequence
  Synthetic polynucleotide
ctaatacgactcactataggcactgtaatttgtaagttaaacttcattatgaggtatgtatgtataggaaaaaacatagtatatgcacagtactatctaaagtttcatgcatccactggaagtctttcagttggatacagatcaggtcag

SEQ ID NO: 1946 - DNA, 150 bp, Artificial Sequence
  Synthetic polynucleotide
ctaatacgactcactataggcactgtcctttagcggtgaagcatgtgacatcaccatacgtgtttgtcattgtggatgccacagagctgtgcagtgcgcgggcttgtcctcttccctcctacagcttcagttggatacagatcaggtcag

SEQ ID NO: 1947 - DNA, 150 bp, Artificial Sequence
  Synthetic polynucleotide
ctaatacgactcactataggcactgtctccttcttactctagtatctctgcctttggtcagtcagagagcatttgatgagtaccatgctgggctggaccccatcctggctgccctggaagatagagtcagttggatacagatcaggtcag

SEQ ID NO: 1948 - DNA, 150 bp, Artificial Sequence
  Synthetic polynucleotide
ctaatacgactcactataggcactgtaagtggatgacaccttgaagacccagatgaattcttttctgctgtccactgccagccaacaggagattgctactctagacaacaaggtaggggtctgtgctcagttggatacagatcaggtcag

SEQ ID NO: 1949 - DNA, 150 bp, Artificial Sequence
  Synthetic polynucleotide
ctaatacgactcactataggcactgtaggttgaaatctcactatctgtgccttttggcagggcagggtcctacagagatgccagcactgagcccagcaccgttagttccattagttcactatgagttcagttggatacagatcaggtcag

SEQ ID NO: 1950 - DNA, 150 bp, Artificial Sequence
  Synthetic polynucleotide
ctaatacgactcactataggcactgtaatccgcaggcgtccaggagcgcgctggcgcgcgtgatgcgccggtaatcggcgtgcgaacggaatgtgcggaagtgcgtgtcgccgggggccggggccgtcagttggatacagatcaggtcag

SEQ ID NO: 1951 - DNA, 150 bp, Artificial Sequence
  Synthetic polynucleotide
ctaatacgactcactataggcactgtgtagctaggactcaaactcccatcttaacctcttgagtagctaggactactactaagtgccaacacacctggctaatgtttttatttttagtagagaaggtcagttggatacagatcaggtcag

SEQ ID NO: 1952 - DNA, 150 bp, Artificial Sequence
  Synthetic polynucleotide
ctaatacgactcactataggcactgtaaaaagtgtgctattaataattgtgttggaataatatgtgtaaaccaggaccgtcttggccaaaccaagatatatgctcattttacccacaatgcaacattcagttggatacagatcaggtcag

SEQ ID NO: 1953 - DNA, 150 bp, Artificial Sequence
  Synthetic polynucleotide
ctaatacgactcactataggcactgtccacaaagggacgggtgccctaccctggtaagaaggtcctcatggcctgtctgtggtccctgaatccctctgccctggtggccttgggcaagtcatgacttcagttggatacagatcaggtcag

SEQ ID NO: 1954 - DNA, 150 bp, Artificial Sequence
  Synthetic polynucleotide
ctaatacgactcactataggcactgtcccgccccgcctcccgcggtcccctcagccccgtttacctgcggctccggcgtccgtagccaccgcccccgtacctgcggggtggcggtccccggcggcttcagttggatacagatcaggtcag

SEQ ID NO: 1955 - DNA, 150 bp, Artificial Sequence
  Synthetic polynucleotide
ctaatacgactcactataggcactgtattaggatctttatgagacttgacttgaaaagagagtttagttgctaaaaattttgaaaacaacagactaatacctttgtacataatggcagccagcatttcagttggatacagatcaggtcag

SEQ ID NO: 1956 - DNA, 150 bp, Artificial Sequence
  Synthetic polynucleotide
ctaatacgactcactataggcactgttcactacaattctttcccataaggagaaataattatcccccaggttattcaggcatttgcctatctatcctccaaggatcccaaaatttccaacttttcctcagttggatacagatcaggtcag

SEQ ID NO: 1957 - DNA, 150 bp, Artificial Sequence
  Synthetic polynucleotide
ctaatacgactcactataggcactgtactcagaaagcaataaaaccatctctgtcatgaaaaacaaaattttacctaattttgtttgatctaagcttgtattaaaaagaatttgttttcttcaatttcagttggatacagatcaggtcag

SEQ ID NO: 1958 - DNA, 150 bp, Artificial Sequence
  Synthetic polynucleotide
ctaatacgactcactataggcactgtcctgctcctagaggacatggctgagcttctgtggtcacagccaccccttgcacggcctggtcccagctcctgagtgtgtggcaggtaccctgggcccagatcagttggatacagatcaggtcag

SEQ ID NO: 1959 - DNA, 150 bp, Artificial Sequence
  Synthetic polynucleotide
ctaatacgactcactataggcactgtaacatggcaaaaccccatctctactaaaaatacaaaaattagccggacatggtgatggtcacctgtaatcccagctactcgggaggctgaggcaggagaatcagttggatacagatcaggtcag

SEQ ID NO: 1960 - DNA, 150 bp, Artificial Sequence
  Synthetic polynucleotide
ctaatacgactcactataggcactgtactttgtctcctgctgcattccagcaaacttcaaatattccacctgttcccctatagctgtgaactagagcacctgtctaaaagaatgaaaaacaaaatctcagttggatacagatcaggtcag

SEQ ID NO: 1961 - DNA, 150 bp, Artificial Sequence
  Synthetic polynucleotide
ctaatacgactcactataggcactgtaccgggtgtccaatcctgcaaacacaacgctgtctgtccccagcatacccaaattttggatggtggctaagattgggaggaagtggttatttcatgctgctcagttggatacagatcaggtcag

SEQ ID NO: 1962 - DNA, 150 bp, Artificial Sequence
  Synthetic polynucleotide
ctaatacgactcactataggcactgttttccatgagggtaaaattctgctgagatttgcaagtagctgcgatagctcaagaagtcagagaaagaggtccttgtgggtttccacatgtgcctctccctcagttggatacagatcaggtcag

SEQ ID NO: 1963 - DNA, 150 bp, Artificial Sequence
  Synthetic polynucleotide
ctaatacgactcactataggcactgttttcattcattgtaatgaatttaattttcattaacatagatctctaatatttttctcagctcaccacaacctccacctcccgggttcaagtgattctcattcagttggatacagatcaggtcag

SEQ ID NO: 1964 - DNA, 150 bp, Artificial Sequence
  Synthetic polynucleotide
ctaatacgactcactataggcactgtcaccctacctcttgatccatatctcctggctcttatctcaaacagccctgtactctggacactggtctagggaatctagccaaagtatggagtctgcctttcagttggatacagatcaggtcag

SEQ ID NO: 1965 - DNA, 150 bp, Artificial Sequence
  Synthetic polynucleotide
ctaatacgactcactataggcactgtttgttttcccatttgggtttaactgtggctaagaatacttttctattctgtaagttatatcttttatacattttcaaaatgagatctacttacctatggctcagttggatacagatcaggtcag

SEQ ID NO: 1966 - DNA, 150 bp, Artificial Sequence
  Synthetic polynucleotide
ctaatacgactcactataggcactgtatggagcctcctggagactgggggcctcctccctggagatccacccccaaaaccgacgtcttgaggctggtgagcccccgagcctcctctccgtctgctctcagttggatacagatcaggtcag

SEQ ID NO: 1967 - DNA, 150 bp, Artificial Sequence
  Synthetic polynucleotide
ctaatacgactcactataggcactgttcctgcctcagcctcccaagtagctgggattacaggcacctgccatcacgcccggttaatttttgtattttagtagagacggggtttcaccatgttggcttcagttggatacagatcaggtcag

SEQ ID NO: 1968 - DNA, 150 bp, Artificial Sequence
  Synthetic polynucleotide
ctaatacgactcactataggcactgttataaatgcattttatttttggacttgggagagaagaaaagactctatgaacaactgagcaatagggggaaacaggatggtcatcacagaatcattgatttcagttggatacagatcaggtcag

SEQ ID NO: 1969 - DNA, 150 bp, Artificial Sequence
  Synthetic polynucleotide
ctaatacgactcactataggcactgtgtgtgccgggcgctgtgctaggccgagggcgagttgggtatgtctgggccccgtcccctgggcctctgcctgcctcggtctccacaacccgaagccacgatcagttggatacagatcaggtcag

SEQ ID NO: 1970 - DNA, 150 bp, Artificial Sequence
  Synthetic polynucleotide
ctaatacgactcactataggcactgtttatattctttgaaataccataacctcattttcagcctacagcttgcagagggcacatatgaaagcatttgagtgtcctcatagaacagaggcataaaattcagttggatacagatcaggtcag

SEQ ID NO: 1971 - DNA, 150 bp, Artificial Sequence
  Synthetic polynucleotide
ctaatacgactcactataggcactgtgcactttgggaggccaaggtggatggatcacctgaggtgaggagttcgagacccgcctggccaatgtggcaaaaccctgtttctactaaagatacaaaaatcagttggatacagatcaggtcag

SEQ ID NO: 1972 - DNA, 150 bp, Artificial Sequence
  Synthetic polynucleotide
ctaatacgactcactataggcactgtactcatcatagtgttcctgcatctccacatcgctcacggcacctgcaaacaacagaaatcttgctggttagaacatgttaaccgagtgaactcttgtgtttcagttggatacagatcaggtcag

SEQ ID NO: 1973 - DNA, 150 bp, Artificial Sequence
  Synthetic polynucleotide
ctaatacgactcactataggcactgtggtcagaatgaaaagaattcagtcttcttttatagtctctaataactactaaaactatgttccaatattatacagtagtgaaggggttaaacatgttaggtcagttggatacagatcaggtcag

SEQ ID NO: 1974 - DNA, 150 bp, Artificial Sequence
  Synthetic polynucleotide
ctaatacgactcactataggcactgtgtcgaggaagcagttaggtagttgtgaaaacccaggtgaggaataactaggccttacctaaggtgcaggcagtaatcttgccatggcctttaagcagagatcagttggatacagatcaggtcag

SEQ ID NO: 1975 - DNA, 150 bp, Artificial Sequence
  Synthetic polynucleotide
ctaatacgactcactataggcactgtgggagagagattcttcccatccaccaaatgctaccctgattacccacgtcagtcctaactcctgcattgccccaggtgccagtcagcaaggcctacgccatcagttggatacagatcaggtcag

SEQ ID NO: 1976 - DNA, 150 bp, Artificial Sequence
  Synthetic polynucleotide
ctaatacgactcactataggcactgtatcccaaactttaacattaatgttacaaaagatgataccctttgtattattcccactgtgctcccgacacgtgctcaagcttcttgtaaattacaaacattcagttggatacagatcaggtcag

SEQ ID NO: 1977 - DNA, 150 bp, Artificial Sequence
  Synthetic polynucleotide
ctaatacgactcactataggcactgttggagagctcagcatggattttactgaacgttaaatcaaccagcaagcgcagccagcaaactctgtggcactttaactttaaataatgcaataattattgtcagttggatacagatcaggtcag

SEQ ID NO: 1978 - DNA, 150 bp, Artificial Sequence
  Synthetic polynucleotide
ctaatacgactcactataggcactgtcttggatccctctcttccaagccatatgactgacttgggcaagtgtgcttttctaggtctcagcttccgtctttgcaaagtggtgaaaatactagccccctcagttggatacagatcaggtcag
